(19) United States
(12) Patent Application Publication
(10) Pub. No.: US 2024/0401059 A1
(43) Pub. Date: Dec. 5, 2024

(54) COMPOSITIONS AND METHODS FOR MODULATING PNPLA3 EXPRESSION

(71) Applicant: Dicerna Pharmaceuticals, Inc., Lexington, MA (US)

(72) Inventors: Utsav Saxena, Watertown, MA (US); Henryk T. Dudek, Belmont, MA (US); Marc Abrams, Natick, MA (US); Anton Turanov, Revere, MA (US); Bob Dale Brown, Littleton, MA (US)

(21) Appl. No.: 18/793,462

(22) Filed: Aug. 2, 2024

Related U.S. Application Data
(63) Continuation of application No. 17/719,821, filed on Apr. 13, 2022, now Pat. No. 12,084,662.
(60) Provisional application No. 63/174,932, filed on Apr. 14, 2021.

(51) Int. Cl. C12N 15/113; A61K 31/7125; C07H 21/02; C12P 19/34

(52) U.S. Cl. CPC C12N 15/1137; A61K 31/7125; C07H 21/02; C12N 2310/315; C12N 2310/32; C12N 2310/321; C12N 2310/3515; C12P 19/34

(57) ABSTRACT

Oligonucleotides and compositions including the same are disclosed for inhibiting or reducing patatin-like phospholipase domain-containing protein 3 (PNPLA3) gene expression. Methods of making and using the oligonucleotides also are disclosed, particularly uses relating to treating diseases, disorders and/or conditions associated with PNPLA3 expression.

### CROSS-REFERENCE TO RELATED APPLICATIONS

[0001] This application is a continuation application of U.S. application Ser. No. 17/719,821, filed Apr. 13, 2022, which claims priority under 35 U.S.C. § 119(e) from U.S. Provisional Application No. 63/174,932, filed Apr. 14, 2021, the contents of each of which are herein incorporated by reference in their entireties.

### SEQUENCE LISTING

[0002] The instant application contains a Sequence Listing which has been submitted electronically in XML file format and is hereby incorporated by reference in its entirety. Said XML copy, created on Jul. 31, 2024, is named “400930_028USC1_211271_SL.xml” and is 1,774,047 bytes in size.

### TECHNICAL FIELD

[0003] The disclosure relates generally to biology and medicine, and more particularly it relates to the use of oligonucleotide compositions for inhibiting or reducing patatin-like phospholipase domain-containing protein 3 (PNPLA3) gene expression, as well as to uses thereof, particularly uses relating to treating diseases, disorders and/or conditions associated with PNPLA3.

### BACKGROUND

[0004] PNPLA3 is a protein encoded by PNPLA3 and is a protein having triacylglycerol lipase and acylglycerol transacylase activities. Human PNPLA3 is expressed highly in the liver and moderately in the adipose tissue, brain, kidney, and skin.

[0005] Of particular interest herein is a mutation of an isoleucine (Ile/I) to a methionine (Met/M) at position 148 in human PNPLA3 (I148M or PNPLA3 148M; i.e., PNPLA3 rs738409). See, Pingitore & Romeo (2019) BIOCHIM. BIOPHYS. ACTA MOL. CELL BIOL. LIPIDS 1864:900-906. Compared to wild-type PNPLA3, PNPLA3 148M lacks lipase activity but appears to have increased transacylase activity. See, Kumari et al. (2012) CELL METAB. 15:691-702.

[0006] PNPLA3 148M is strongly associated with a wide spectrum of liver diseases resulting from triglyceride (TG) accumulation, liver injury and fibrosis, including alcoholic hepatitis (AH), alcoholic liver disease (ALD), cirrhosis, hepatocellular carcinoma (HCC), non-alcoholic fatty liver disease (NAFLD), and non-alcoholic steatohepatitis (NASH). It appears that PNPLA3 148M degradation by proteasomes is delayed, which results in an accumulation of the protein on the surface of lipid droplets and which does not allow other proteins to metabolize TGs in hepatocytes. As such, reducing PNPLA3 148M expression may allow other lipases to function normally and reverse the adverse effects of PNPLA3 I148M across a variety of pathologies.

[0007] Several RNA-based therapeutics are known for attempting to inhibit or reduce PNPLA3 expression. For example, Intl. Patent Application Publication Nos. WO 2016/130806 and WO 2019/118638 describe double-stranded (ds) RNAi constructs for inhibiting or reducing PNPLA3 expression, as well as methods of using the same for treating or preventing liver diseases such as NAFLD. Also, Intl. Patent Application Publication No. WO 2020/061200 describes antisense oligonucleotides for inhibiting or reducing PNPLA3 expression.

[0008] Despite the existence of some therapeutics directed toward PNPLA3, there is a need for additional therapeutics for inhibiting or reducing PNPLA3 expression for treating liver disease.

### BRIEF SUMMARY

[0009] To address this need, the disclosure describes compositions and methods for treating a disease, disorder, and/or condition related to PNPLA3 expression. The disclosure is based, in part, on discovering and developing ds oligonucleotides (e.g., RNAi oligonucleotides) for selectively inhibiting and/or reducing PNPLA3 expression in, for example, the liver. Accordingly, target sequences within PNPLA3 have been identified, and RNAi oligonucleotides that bind to these target sequences and inhibit PNPLA3 mRNA expression have been generated. As shown herein, the RNAi oligonucleotides inhibit human and cynomolgus monkey PNPLA3 expression in the liver. Without being bound by theory, the RNAi oligonucleotides herein are useful for treating a disease, disorder or condition associated with PNPLA3 expression (e.g., liver disease such as AH, ALD, cirrhosis, HCC, cholangiocarcinoma (CCA), primary sclerosing cholangitis (PSC), NAFLD, and NASH). In general, the RNAi oligonucleotides herein are useful for treating a disease, disorder, or condition associated with aberrant PNPLA3 expression (e.g., mutant PNPLA3 allele expression). In particular, the RNAi oligonucleotides herein are useful for treating a disease, disorder, or condition associated with mutant PNPLA3 expression.

[0010] Accordingly, the disclosure describes RNAi oligonucleotides for reducing or inhibiting PNPLA3 expression that includes a sense strand having a sequence as set forth in Table 1 (e.g., SEQ ID NOs: 9, 11, 13, 15, 17, 19, 21, 23, 25, 27, 29, 31, 33, 35, 37, 39, 41, 43, 45, 47, 49, 51, 53, 55, 57, 59, 61, 63, 65, 67, 69, 71, 73, 75, 77, 79, 81, 83, 85, 87, 89, 91, 93, 95, 97, 99, 101, 103, 105, 107, 109, 111, 113, 115, 117, 119, 121, 123, 125, 127, 129, 131, 133, 135, 137, 139, 141, 143, 145, 147, 149, 151, 153, 155, 157, 159, 161, 163, 165, 167, 169, 171, 173, 175, 177, 179, 181, 183, 185, 187, 189, 191, 193, 195, 197, 199, 201, 203, 205, 207, 209, 211, 213, 215, 217, 219, 221, 223, 225, 227, 229, 231, 233, 235, 237, 239, 241, 243, 245, 247, 249, 251, 253, 255, 257, 259, 261, 263, 265, 267, 269, 271, 273, 275, 277, 279, 281, 283, 285, 287, 289, 291, 293, 295, 297, 299, 301, 303, 305, 307, 309, 311, 313, 315, 317, 319, 321, 323, 325, 327, 329, 331, 333, 335, 337, 339, 341, 343, 345, 347, 349, 351, 353, 355, 357, 359, 361, 363, 365, 367, 369, 371, 373, 375, 377, 379, 381, 383, 385, 387, 389, 391, 393, 395, 397, 399, 401, 403, 405, 407, 409, 411, 413, 415, 417, 419, 421, 423, 425, 427, 429, 431, 433, 435, 437, 439, 441, 443, 445, 447, 449, 451, 453, 455, 457, 459, 461, 463, 465, 467, 469, 471, 473, 475, 477, 479, 481, 483, 485, 487, 489, 491, 493, 495, 497, 499, 501, 503, 505, 507, 509, 511, 513, 515, 517, 519, 521, 523, 525, 527, 529, 531, 533, 535, 537, 539, 541, 543, 545, 547, 549, 551, 553, 555, 557, 559, 561, 563, 565, 567, 569, 571, 573, 575, 577, 579, 581, 583, 585, 587, 589, 591, 593, 595, 597, 599, 601, 603, 605, 607, 609, 611, 613, 615, 617, 619, 621, 623, 625, 627, 629, 631, 633, 635, 637, 639, 641, 643, 645, 647, 649, 651, 653, 655, 657, 659, 661, 663, 665, 667, 669, 671, 673, 675, 677, 679, 681, 683, 685, 687, 689, 691, 693, 695, 697, 699, 701, 703, 705, 707, 709, 711, 713, 715, 717, 719, 721, 723, 725, 727, 729, 731, 733, 735, 737, 739, 741, 743, 745, 747, 749, 751, 753, 755, 757, 759, 761, 763, 765, 767, 769, 771, 773, and 775) or Table 3 (e.g., SEQ ID NOs: 777, 779, 781, 783, 785, 787, 789, 791, 793, 795, 797, 799, 801, 803, 805, 807, 809, 811, 813, 815, 817, 819, 821, 823, 825, 827, 829, 831, 833, 835, 837, 839, 841, 843, 845, 847, 849, 851, 853, 855, 857, 859, 861, 863, 865, 867, 869, 871, 873, 875, 877, 879, 881, 883, 885, 887, 889, 891, 893, 895, 897, 899, 901, 903, 905, 907, 909, 911, 913, 915, 917, 919, 921, 923, 925, 927, 929, 931, 933, 935, 937, 939, 941, 943, 945, 947, 949, 951, 953, 955, 957, 959, 961, 963, 965, 967, 969, 971, 973, 975, 977, 979, 981, 983, 985, 987, 989, 991, 993, 995, 997, 999, 1001, 1003, 1005, 1007, 1009, 1011, 1013, 1015, 1017, 1019, 1021, 1023, 1025, 1027, 1029, 1031, 1033, 1035, 1037, 1039, 1041, 1043, 1045, 1047, 1049, 1051, 1053, 1055, 1057, 1059, 1061, 1063, 1065, 1067, 1069, 1071, 1073, 1075, 1077, 1079, 1081, 1083, 1085, 1087, 1089, 1091, 1093, 1095, 1097, 1099, 1101, 1103, 1105, 1107, 1109, 1111, 1113, 1115, 1117, 1119, 1121, 1123, 1125, 1127, 1129, 1131, 1133, 1135, 1137, 1139, 1141, 1143, 1145, 1147, 1149, 1151, 1153, 1155, 1157, 1159, 1161, and 1163), especially any one of SEQ ID NOs: 787, 843, 867, 871, 937, 1003, 1007, 1017, 1161, or 1163.

[0011] Alternatively, the disclosure describes RNAi oligonucleotides for reducing or inhibiting PNPLA3 expression that includes an antisense strand having a sequence as set forth in Table 1 (e.g., SEQ ID NOs: 10, 12, 14, 16, 18, 20, 22, 24, 26, 28, 30, 32, 34, 36, 38, 40, 42, 44, 46, 48, 50, 52, 54, 56, 58, 60, 62, 64, 66, 68, 70, 72, 74, 76, 78, 80, 82, 84, 86, 88, 90, 92, 94, 96, 98, 100, 102, 104, 106, 108, 110, 112, 114, 116, 118, 120, 122, 124, 126, 128, 130, 132, 134, 136, 138, 140, 142, 144, 146, 148, 150, 152, 154, 156, 158, 160, 162, 164, 166, 168, 170, 172, 174, 176, 178, 180, 182, 184, 186, 188, 190, 192, 194, 196, 198, 200, 202, 204, 206, 208, 210, 212, 214, 216, 218, 220, 222, 224, 226, 228, 230, 232, 234, 236, 238, 240, 242, 244, 246, 248, 250, 252, 254, 256, 258, 260, 262, 264, 266, 268, 270, 272, 274, 276, 278, 280, 282, 284, 286, 288, 290, 292, 294, 296, 298, 300, 302, 304, 306, 308, 310, 312, 314, 316, 318, 320, 322, 324, 326, 328, 330, 332, 334, 336, 338, 340, 342, 344, 346, 348, 350, 352, 354, 356, 358, 360, 362, 364, 366, 368, 370, 372, 374, 376, 378, 380, 382, 384, 386, 388, 390, 392, 394, 396, 398, 400, 402, 404, 406, 408, 410, 412, 414, 416, 418, 420, 422, 424, 426, 428, 430, 432, 434, 436, 438, 440, 442, 444, 446, 448, 450, 452, 454, 456, 458, 460, 462, 464, 466, 468, 470, 472, 474, 476, 478, 480, 482, 484, 486, 488, 490, 492, 494, 496, 498, 500, 502, 504, 506, 508, 510, 512, 514, 516, 518, 520, 522, 524, 526, 528, 530, 532, 534, 536, 538, 540, 542, 544, 546, 548, 550, 552, 554, 556, 558, 560, 562, 564, 566, 568, 570, 572, 574, 576, 578, 580, 582, 584, 586, 588, 590, 592, 594, 596, 598, 600, 602, 604, 606, 608, 610, 612, 614, 616, 618, 620, 622, 624, 626, 628, 630, 632, 634, 636, 638, 640, 642, 644, 646, 648, 650, 652, 654, 656, 658, 660, 662, 664, 666, 668, 670, 672, 674, 676, 678, 680, 682, 684, 686, 688, 690, 692, 694, 696, 698, 700, 702, 704, 706, 708, 710, 712, 714, 716, 718, 720, 722, 724, 726, 728, 730, 732, 734, 736, 738, 740, 742, 744, 746, 748, 750, 752, 754, 756, 758, 760, 762, 764, 766, 768, 770, 772, 774, and 776) or Table 3 (e.g., SEQ ID NOs: 778, 780, 782, 784, 786, 788, 790, 792, 794, 796, 798, 800, 802, 804, 806, 808, 810, 812, 814, 816, 818, 820, 822, 824, 826, 828, 830, 832, 834, 836, 838, 840, 842, 844, 846, 848, 850, 852, 854, 856, 858, 860, 862, 864, 866, 868, 870, 872, 874, 876, 878, 880, 882, 884, 886, 888, 890, 892, 894, 896, 898, 900, 902, 904, 906, 908, 910, 912, 914, 916, 918, 920, 922, 924, 926, 928, 930, 932, 934, 936, 938, 940, 942, 944, 946, 948, 950, 952, 954, 956, 958, 960, 962, 964, 966, 968, 970, 972, 974, 976, 978, 980, 982, 984, 986, 988, 990, 992, 994, 996, 998, 1000, 1002, 1004, 1006, 1008, 1010, 1012, 1014, 1016, 1018, 1020, 1022, 1024, 1026, 1028, 1030, 1032, 1034, 1036, 1038, 1040, 1042, 1044, 1046, 1048, 1050, 1052, 1054, 1056, 1058, 1060, 1062, 1064, 1066, 1068, 1070, 1072, 1074, 1076, 1078, 1080, 1082, 1084, 1086, 1088, 1090, 1092, 1094, 1096, 1098, 1100, 1102, 1104, 1106, 1108, 1110, 1112, 1114, 1116, 1118, 1120, 1122, 1124, 1126, 1128, 1130, 1132, 1134, 1136, 1138, 1140, 1142, 1144, 1146, 1148, 1150, 1152, 1154, 1156, 1158, 1160, 1162, and 1164), especially any one of SEQ ID NOs: 788, 844, 868, 872, 938, 1004, 1008, 1018, 1162, or 1164.

[0012] In certain embodiments, the disclosure describes RNAi oligonucleotides for reducing or inhibiting PNPLA3 expression that includes a sense strand having a sequence as set forth in Table A, B, C or D (e.g., SEQ ID NOs: 1178, 1180, 1182, 1184, 1186, 1188, 1190, 1192, 1194, 1196, 1198, 1200, 1202, 1204, 1206, 1208, 1210, 1212, 1214, 1216, 1218, 1220, 1222, 1224, 1226, 1228, 1230, 1232, 1234, 1236, 1238, 1240, 1242, 1244, 1246, 1248, 1250, 1252, 1254, 1256, 1258, 1260, 1262, 1264, 1266, 1268, 1270, 1272, 1274, 1276, 1278, 1280, 1282, 1284, 1286, 1288, 1290, 1292, 1294, 1296, 1298, or 1300).

[0013] In certain embodiments, the disclosure describes RNAi oligonucleotides for reducing or inhibiting PNPLA3 expression that includes an antisense strand having a sequence as set forth in Table A, B, C or D (e.g., SEQ ID NOs: 1179, 1181, 1183, 1185, 1187, 1189, 1191, 1193, 1195, 1197, 1199, 1201, 1203, 1205, 1207, 1209, 1211, 1213, 1215, 1217, 1219, 1221, 1223, 1225, 1227, 1229, 1231, 1233, 1235, 1237, 1239, 1241, 1243, 1245, 1247, 1249, 1251, 1253, 1255, 1257, 1259, 1261, 1263, 1265, 1267, 1269, 1271, 1273, 1275, 1277, 1279, 1281, 1283, 1285, 1287, 1289, 1291, 1293, 1295, 1297, 1299, or 1301).

[0014] In some embodiments, RNAi oligonucleotides are described for reducing or inhibiting PNPLA3 expression that include an antisense strand and a sense strand, where the antisense strand has a sequence as set forth in Table 1 or Table 3, and where the sense strand has a sequence as set forth in Table 1 or Table 3.

[0015] In some embodiments, RNAi oligonucleotides are described for reducing or inhibiting PNPLA3 expression that include an antisense strand and a sense strand, where the antisense strand has a sequence as set forth in Table A, Table B, Table C, or Table D, and where the sense strand has a sequence as set forth in Table A, Table B, Table C, or Table D.

[0016] In some embodiments, RNAi oligonucleotides are described for reducing or inhibiting PNPLA3 expression that include an antisense strand and a sense strand, where the antisense and sense strands form a duplex region, and where the antisense strand has a region of complementarity to a PNPLA3 mRNA target sequence of any one of SEQ ID NOS:1167 to 1176.

[0017] In any of the embodiments above, the antisense strand is from about 15 nucleotides to about 30 nucleotides in length. In some embodiments, the antisense strand is from about 20 nucleotides to about 25 nucleotides. In some embodiments, the antisense strand is 22 nucleotides in length.

[0018] In any of the embodiments above, the sense strand is from about 15 nucleotides to about 50 nucleotides in length. In some instances, the sense strand is from about 20 nucleotides to about 40 nucleotides in length. In some embodiments, the sense strand is 36 nucleotides in length.

[0019] In any of the embodiments above, the duplex region is from about 19 nucleotides in length to about 21 nucleotides in length. In certain embodiment, the duplex region is 20 nucleotides in length.

[0020] In any of the embodiments above, the region of complementarity is at least 15 contiguous nucleotides in length. In some embodiments, the region of complementarity is from about 19 contiguous nucleotides in length to about 21 contiguous nucleotides in length. In other embodiments, the region of complementarity is 19 contiguous nucleotides in length or 21 contiguous nucleotides in length.

[0021] In any of the embodiments above, the RNAi oligonucleotides include on the sense strand a 3′ end a stem-loop set forth as: S1-L-S2, where S1 is complementary to S2, and where L forms a loop between S1 and S2 of about 3 to about 5 nucleotides in length.

[0022] In any of the embodiments above, the antisense strand, the sense strand, or both have an overhang sequence. In some embodiments, the antisense strand includes a 3′-overhang of 1 or more nucleotides in length. In other embodiments, the 3′-overhang sequence is 2 nucleotides in length such as, for example, GG.

[0023] Oligonucleotides also are described that include an antisense strand and a sense strand, where the antisense strand can be from about 21 nucleotides to about 27 nucleotides in length and has a region of complementarity to PNPLA3, wherein the sense strand includes a stem-loop at its 3′ end set forth as: S1-L-S2, wherein S1 is complementary to S2, wherein L forms a loop between S1 and S2 from about 3 nucleotides to about 5 nucleotides in length, and wherein the antisense strand and the sense strand form a duplex structure of at least about 19 nucleotides in length but are not covalently linked.

[0024] In some embodiments, the loop L is a triloop or a tetraloop. In some instances, L is a tetraloop of 4 nucleotides in length. In other embodiments, L includes a sequence 5′-GAAA-3′.

[0025] In some embodiments, S1 and S2 are 1-10 nucleotides in length and have the same length. In other embodiments, S1 and S2 are 1 nucleotide, 2 nucleotides, 3 nucleotides, 4 nucleotides, 5 nucleotides, 6 nucleotides, 7 nucleotides, 8 nucleotides, 9 nucleotides, or 10 nucleotides in length. In other embodiments, S1 and S2 are 6 nucleotides in length. In certain embodiments, the stem-loop comprises the sequence 5′-GCAGCCGAAAGGCUGC-3′ (SEQ ID NO:1177).

[0026] In some embodiments, the antisense strand is 27 nucleotides in length and the sense strand is 25 nucleotides in length. In other embodiments, the antisense strand is 22 nucleotides in length and the sense strand is 36 nucleotides in length.

[0027] In the embodiments above, the duplex region includes a 3′-overhang sequence on the antisense strand. In some embodiments, the 3′-overhang sequence on the antisense strand is 2 nucleotides in length.

[0028] In any of the embodiments above, at least one nucleotide in an oligonucleotide is a modified nucleotide. In some instances, the modified nucleotide includes a 2′-modification such as, for example, 2′-aminoethyl, 2′-fluoro, 2′-O-methyl, 2′-O-methoxyethyl and 2′-deoxy-2′-fluoro-β-arabinonucleic acid. In certain instances, all nucleotides in an oligonucleotide include a 2′-modification such as, for example, 2′-fluoro or 2′-O-methyl.

[0029] In any of the embodiments above, at least one nucleotide in an oligonucleotide includes a modified internucleotide linkage. In some embodiments, the modified internucleotide linkage is a phosphorothioate linkage.

[0030] In any of the embodiments above, a 4′-carbon of a sugar of a 5′-nucleotide of the antisense strand includes a phosphate analog such as, for example, an oxymethylphosphonate, vinylphosphonate or malonylphosphonate. Alternatively, or optionally, the phosphate analog is a 4′-phosphate analog including 5′-methoxyphosphonate-4′-oxy.

[0031] In any of the embodiments above, at least one nucleotide of an oligonucleotide can be conjugated to one or more targeting ligands such as, for example, an amino sugar, carbohydrate, cholesterol, lipid, or polypeptide. In some embodiments, the targeting ligand is a N-acetylgalactosamine (GalNAc) moiety. In other embodiments, the GalNAc moiety is a monovalent GalNAc moiety, a bivalent GalNAc moiety, a trivalent GalNAc moiety, or a tetravalent GalNAc moiety.

[0032] In some embodiments, the targeting ligands are conjugated to one or more nucleotides of L of the stem loop. In certain instances, up to 4 nucleotides of L of the stem-loop are each conjugated to a monovalent GalNAc moiety.

[0033] In any of the embodiments above, the oligonucleotide is an RNAi oligonucleotide. In some instances, the RNAi oligonucleotide includes a sense strand having a nucleotide sequence as set forth in Table 1 or Table 3, especially any one of SEQ ID NOs: 787, 843, 867, 871, 937, 1003, 1007, 1017, 1161, or 1163. In certain embodiments, the RNAi oligonucleotide includes a sense strand having a nucleotide sequence as set forth in Table A, B, C, or D, especially any one of SEQ ID NOs: 1188, 1190, 1220, 1224, 1230, 1232, 1244, 1246, 1250, or 1254. In some instances, the RNAi oligonucleotide includes an antisense strand having a nucleotide sequence as set for the in Table 1 or Table 3, especially any one of SEQ ID NOs: 788, 844, 868, 872, 938, 1004, 1008, 1018, 1162, or 1164. In some embodiments, the RNAi oligonucleotide includes an antisense strand having a nucleotide sequence as set for the in Table A, B, C or D, especially any one of SEQ ID NOs: 1189, 1191, 1221, 1225, 1231, 1233, 1245, 1247, 1251, or 1255. In certain instances, the RNAi oligonucleotide includes a sense strand having a nucleotide sequence of any one of SEQ ID NOs: 787, 843, 867, 871, 937, 1003, 1007, 1017, 1161, or 1163, or any one of SEQ ID NOs: 1188, 1190, 1220, 1224, 1230, 1232, 1244, 1246, 1250, or 1254 and an antisense strand having a nucleotide sequence of any one of SEQ ID NOs: 788, 844, 868, 872, 938, 1004, 1008, 1018, 1162, or 1164, any one of SEQ ID NOs: 1189, 1191, 1221, 1225, 1231, 1233, 1245, 1247, 1251, or 1255. In certain embodiments, the sense strand and the antisense strand of the RNAi oligonucleotide, respectively, are selected from:
[0034] (a) SEQ ID NOs: 787 and 788,
[0035] (b) SEQ ID NOs: 843 and 844,
[0036] (c) SEQ ID NOs: 867 and 868,
[0037] (d) SEQ ID NOs: 871 and 872,
[0038] (e) SEQ ID NOs: 937 and 938,
[0039] (f) SEQ ID NOs: 1003 and 1004,
[0040] (g) SEQ ID NOs: 1007 and 1008,
[0041] (h) SEQ ID NOs: 1017 and 1018,
[0042] (i) SEQ ID NOs: 1161 and 1162, and
[0043] (j) SEQ ID NOs: 1163 and 1164.

[0044] In some instances, the RNAi oligonucleotide includes a sense strand having a nucleotide sequence as set forth in Table A, Table B, Table C, or Table D, especially any one of SEQ ID NOs: 1178, 1180, 1182, 1184, 1186, 1188, 1190, 1192, 1194, 1196, 1198, 1200, 1202, 1204, 1206, 1208, 1210, 1212, 1214, 1216, 1218, 1220, 1222, 1224, 1226, 1228, 1230, 1232, 1234, 1236, 1238, 1240, 1242, 1244, 1246, 1248, 1250, 1252, 1254, 1256, 1258, 1260, 1262, 1264, 1266, 1268, 1270, 1272, 1274, 1276, 1278, 1280, 1282, 1284, 1286, 1288, 1290, 1292, 1294, 1296, 1298, or 1300. In some instances, the RNAi oligonucleotide includes an antisense strand having a nucleotide sequence as set for the in Table A, Table B, Table C, or Table D, especially any one of SEQ ID NOs: 1179, 1181, 1183, 1185, 1187, 1189, 1191, 1193, 1195, 1197, 1199, 1202, 1203, 1205, 1207, 1209, 1211, 1213, 1215, 1217, 1219, 1221, 1223, 1225, 1227, 1229, 1231, 1233, 1235, 1237, 1239, 1241, 1243, 1245, 1247, 1249, 1251, 1253, 1255, 1257, 1259, 1261, 1263, 1265, 1267, 1269, 1271, 1273, 1275, 1277, 1279, 1281, 1283, 1285, 1287, 1289, 1291, 1293, 1295, 1297, 1299, or 1301. In certain instances, the RNAi oligonucleotide includes a sense strand having a nucleotide sequence of any one of SEQ ID NOs: 1178, 1180, 1182, 1184, 1186, 1188, 1190, 1192, 1194, 1196, 1198, 1200, 1202, 1204, 1206, 1208, 1210, 1212, 1214, 1216, 1218, 1220, 1222, 1224, 1226, 1228, 1230, 1232, 1234, 1236, 1238, 1240, 1242, 1244, 1246, 1248, 1250, 1252, 1254, 1256, 1258, 1260, 1262, 1264, 1266, 1268, 1270, 1272, 1274, 1276, 1278, 1280, 1282, 1284, 1286, 1288, 1290, 1292, 1294, 1296, 1298, or 1300, and an antisense strand having a nucleotide sequence of any one of SEQ ID NOs: 1179, 1181, 1183, 1185, 1187, 1189, 1191, 1193, 1195, 1197, 1199, 1201, 1203, 1205, 1207, 1209, 1211, 1213, 1215, 1217, 1219, 1221, 1223, 1225, 1227, 1229, 1231, 1233, 1235, 1237, 1239, 1241, 1243, 1245, 1247, 1249, 1251, 1253, 1255, 1257, 1259, 1261, 1263, 1265, 1267, 1269, 1271, 1273, 1275, 1277, 1279, 1281, 1283, 1285, 1287, 1289, 1291, 1293, 1295, 1297, 1299, or 1301.

[0045] In certain instances, the RNAi oligonucleotide includes a sense strand having a nucleotide sequence of any one of SEQ ID NOs: 1188, 1190, 1200, 1216, 1218, 1220, 1224, 1230, 1232, 1234, 1244, 1246, 1250, 1254, 1262, 1288, 1290, 1292, 1294, 1296, 1298, or 1300, and an antisense strand having a nucleotide sequence of any one of SEQ ID NOs: 1189, 1191, 1201, 1215, 1217, 1219, 1225, 1231, 1233, 1235, 1245, 1247, 1251, 1255, 1263, 1289, 1291, 1295, 1297, 1299, or 1301.

[0046] In particular instances, the sense strand and the antisense strand of the RNAi oligonucleotide, respectively, are selected from:
[0047] (a) SEQ ID NOs: 1220 and 1221,
[0048] (b) SEQ ID NOs: 1224 and 1225,
[0049] (c) SEQ ID NOs: 1230 and 1231,
[0050] (d) SEQ ID NOs: 1232 and 1233,
[0051] (e) SEQ ID NOs: 1188 and 1189,
[0052] (f) SEQ ID NOs: 1190 and 1191,
[0053] (g) SEQ ID NOs: 1244 and 1245,
[0054] (h) SEQ ID NOs: 1250 and 1251-,
[0055] (i) SEQ ID NOs: 1254 and 1255, and
[0056] (j) SEQ ID NOs: 1246 and 1247.

[0057] Oligonucleotides also are described for inhibiting or reducing PNPLA3 expression that include a sense strand and an antisense strand, where the sense strand and the antisense strand form a duplex region, where all nucleotides of the sense strand and the antisense strand include a modification of a base, a sugar and/or an internucleotide linkage, where the antisense strand includes a region of complementarity to a PNPLA3 mRNA target sequence of one of SEQ ID NOs: 1167 to 1176, and where the region of complementarity is at least about 15 contiguous nucleotides in length.

[0058] In other aspects, pharmaceutical compositions are described that include at least one oligonucleotide herein and a pharmaceutically acceptable carrier, delivery agent or excipient. In some instances, the pharmaceutical compositions include an additional therapeutic agent such as, for example, an antidiabetic agent or anti-obesity agent.

[0059] In other aspects, methods are described for reducing PNPLA3 expression in a cell, a population of cells, a tissue, an organ, or an individual that include at least a step of administering/contacting the cell, the population of cells, the tissue, the organ, or the individual with an oligonucleotide herein or a pharmaceutical composition herein. In some instances, reducing PNPLA3 expression includes reducing an amount or level of PNPLA3 mRNA, an amount or level of PNPLA3 protein, or both in the cell, the population of cells, the tissue, the organ, or the individual. In some instances, the cell, the cell population, the tissue, the organ, or the individual has a disease, disorder, or condition associated with PNPLA3 expression. In certain instances, the disease, disorder, or condition associated with PNPLA3 expression is a cardiometabolic disease, AH, ALD, cirrhosis, HCC, CCA, and other cholangiopathies (such as PSC), NAFLD, and NASH.

[0060] In other aspects, methods are described for treating an individual having or suspected of having a disease, disorder or condition associated with PNPLA3 expression. The methods include at least a step of administering to an individual in need thereof an effective amount of an oligonucleotide herein or a pharmaceutical composition herein. In some instances, the disease, disorder, or condition associated with PNPLA3 expression is a cardiometabolic disease, AH, ALD, CCA, cirrhosis, HCC, NAFLD, PSC, and NASH. In some instances, the oligonucleotide or pharmaceutical composition is administered daily, weekly, monthly, quarterly, yearly via SQ administration, especially monthly or quarterly.

[0061] In some instances, the individual has cirrhosis, diabetes, hepatic fibrosis, hepatic inflammation, hyperlipidemia, AH, ALD, CCA, cirrhosis, HCC, NAFLD, PSC, NASH, obesity, and/or steatosis.

[0062] In any of the embodiments above, the methods comprise additional steps such as measuring or obtaining genotype information, PNPLA3 expression, PNPLA3 protein levels, the individual's weight and/or blood glucose and/or TGs and comparing such obtained values to one or more baseline values or previously obtained values to assess the effectiveness of contacting or administering. In some embodiments, the additional step comprises confirming that the individual has a PNPLA3 I148M variant. In some embodiments, the additional step comprises confirming that the individual does not have a PNPLA3 E434K variant. In some embodiments, the additional step comprises confirming that the individual does not have a protein truncating HSD17B13 variant (rs72613567).

[0063] In any of the embodiments above, the methods can include administering the RNAi oligonucleotide or pharmaceutical composition simultaneously, separately, or sequentially with a second composition or a second therapeutic agent. In some embodiments, the second composition or a second therapeutic agent is a PNPLA3 antibody or fragment thereof, an antidiabetic agent or anti-obesity agent. In some embodiments, the second composition or second therapeutic agent is administered with a frequency same as the RNAi oligonucleotide (i.e., every other day, twice a week, or even weekly). In other embodiments, the second composition or second therapeutic agent is administered with a frequency distinct from the RNAi oligonucleotide. Likewise, in other embodiments, the second composition or second therapeutic agent is administered via the same route as the RNAi oligonucleotide (e.g., SQ). In still other embodiments, the second composition or second therapeutic agent is administered via a route that differs from the RNAi oligonucleotide).

[0064] In other aspects, uses are described for the RNAi oligonucleotides herein for treating a disease, disorder or condition associated with PNPLA3 expression, which optionally are administered simultaneously, separately, or sequentially (i.e., in combination) with a second composition or second therapeutic agent.

[0065] In other aspects, uses are described for the RNAi oligonucleotides herein in manufacturing a medicament for treating a disease, disorder, or condition associated with PNPLA3 expression, where the medicament optionally further includes a second composition or second therapeutic agent.

[0066] In other aspects, kits are described that include at least one oligonucleotide herein, an optional pharmaceutically acceptable carrier, and a package insert having instructions for administering the same to an individual having a disease, disorder, or condition associated with PNPLA3 expression.

[0067] An advantage of the oligonucleotides and compositions herein is that suppressed PNPLA3 expression, especially PNPLA3 148M, exerts a beneficial effect on the entire spectrum of NAFLD including fibrosis.

### BRIEF DESCRIPTION OF THE DRAWINGS

[0068] The advantages, effects, features, and objects other than those set forth above will become more readily apparent when consideration is given to the detailed description below. Such detailed description refers to the following drawing(s), where:

[0069] FIG. 1 discloses a schematic depicting the structure and chemical modification pattern of a generic GalNAc-conjugated PNPLA3 oligonucleotide. FIG. 1 discloses SEQ ID NOS 1302-1303, respectively, in order of appearance. The sense strand has a modification pattern M1405, wherein nucleotides at positions 1, 2, 3, 4, 5, 6, 7, 12, 13, 14, 15, 16, 17, 18, 19, 20, 21, 22, 23, 24, 25, 26, 27, 31, 32, 33, 34, 35, and 36 are modified with 2′-O-methyl; nucleotides at positions 8, 9, 10, and 11 are modified with 2′-fluoro; the internucleotide linkage between nucleotides at positions 1 and 2 is a phosphorothioate linkage; and nucleotides at positions 28, 29, and 30 are modified with adem-GalNAc. The antisense strand has a modification pattern M2028, wherein nucleotides at positions 1, 6, 8, 9, 11, 12, 13, 15, 16, 17, 18, 19, 20, 21, and 22 are modified with 2′-O-methyl; nucleotides at positions 2, 3, 4, 5, 7, 10, and 14 are modified with 2′-fluoro; the internucleotide linkages between nucleotides at positions 1 and 2, positions 2 and 3, positions 3 and 4, positions 20 and 21, and positions 21 and 22 are phosphorothioate linkages; and nucleotide at position 1 is a 4′-phosphate analog comprising 5′-methoxyphosphonate-4′-oxy.

[0070] FIG. 2 discloses a schematic depicting the structure and chemical modification pattern of an alternative generic GalNAc-conjugated PNPLA3 oligonucleotide. The sense strand has a modification pattern M107, wherein nucleotides at positions 2, 4, 14 and 16 are modified with 2′-O-methyl; nucleotides at positions 1, 3, 5, 6, 7, 8, 9, 10, 11, 12, 13, 15, 17, 18, 19, 20, 21, 22 and 23 are RNA nucleotides; and nucleotides at positions 24 and 25 are DNA nucleotides. The antisense strand has a modification pattern M48, wherein nucleotides at positions 1, 2, 3, 4, 11, 13, 23, 25, 26 and 27 are modified with 2′-O-methyl; and nucleotides at positions 5, 6, 7, 8, 9, 10, 12, 14, 15, 16, 17, 18, 19, 20, 21, 22 and 24 are RNA nucleotides.

### DETAILED DESCRIPTION

### Overview

[0071] ALD and NAFLD are serious public health burdens. ALD and NAFLD are chronic liver disorders that begin with hepatic TG accumulation (steatosis) and progress to hepatic inflammation and fibrosis, cirrhosis, and even liver cancer. PNPLA3 148M is a genetic factor that has been shown to be associated with ALD and NAFLD, as well, as cirrhosis, HCC, and liver-related death.

[0072] RNA interference (RNAi) is a process of introducing exogeneous RNA into a cell leading to specific degradation of the mRNA encoding the targeted protein with a resultant decrease in target gene expression.

[0073] In humans, PNPLA3 is 481 amino acids in length with a predicted molecular weight of 52.865 kD. Exemplary nucleic acid sequences for PNPLA3 can be found in NCBI Ref. Seq. No. NM_025225 (human), NM_054088 or XM_006520346 (mouse), NM_001282324 (rat), XM_015457081 (primate), XM_005567051 (primate) and XM_001109144 (primate). One of skill in the art, however, understands that additional examples of PNPLA3 mRNA sequences are readily available using publicly available databases such as, for example, GenBank and UniProt.

### Definitions

[0074] As used herein, “about” means within a statistically meaningful range of a value or values such as, for example, a stated concentration, length, molecular weight, pH, sequence similarity, time frame, temperature, volume, etc. Such a value or range can be within an order of magnitude typically within 20%, more typically within 10%, and even more typically within 5% of a given value or range. The allowable variation encompassed by “about” will depend upon the system under study, and can be readily appreciated by one of skill in the art.

[0075] As used herein, “administer,” “administering,” “administration” and the like refers to providing a substance (e.g., an oligonucleotide herein or a composition herein) to an individual in a manner that is pharmacologically useful (e.g., to treat a disease, disorder, or condition in the individual).

[0076] As used herein, “antisense strand” means an oligonucleotide herein that is complimentary to a region of a target sequence. Likewise, and as used herein, “sense strand” means an oligonucleotide herein that is complimentary to a region of an antisense strand.

[0077] As used herein, “asialoglycoprotein receptor” or “ASGPR” means a bipartite C-type lectin formed by a major 48 kDa subunit (ASGPR-1) and minor 40 kDa subunit (ASGPR-2). ASGPR is primarily expressed on the sinusoidal surface of hepatocyte cells and has a major role in binding, internalizing and subsequent clearing of circulating glycoproteins that contain terminal galactose or GalNAc residues (asialoglycoproteins).

[0078] As used herein, “attenuate,” “attenuating,” “attenuation” and the like refers to reducing or effectively halting. As a non-limiting example, one or more of the treatments herein may reduce or effectively halt the onset or progression of AH, ALD, CCA, PSC, cirrhosis, HCC, NAFLD, and NASH, as well as related diseases, disorders, and conditions in an individual. This attenuation may be exemplified by, for example, a decrease in one or more aspects (e.g., symptoms, tissue characteristics, and cellular, inflammatory, or immunological activity, etc.) of AH, ALD, cirrhosis, HCC, CCA, PSC, NAFLD, and NASH, as well as related diseases, disorders and conditions, no detectable progression (worsening) of one or more aspects of AH, ALD, cirrhosis, HCC, CCA, PSC, NAFLD, and NASH, as well as related diseases, disorders and conditions, or no detectable aspects of AH, ALD, cirrhosis, HCC, NAFLD, and NASH, as well as related diseases, disorders and conditions in an individual when they might otherwise be expected.

[0079] As used herein, “attenuate,” “attenuating,” “attenuation” and the like means reducing or effectively halting. As a non-limiting example, one or more of the treatments herein may reduce or effectively halt the onset or progression of dyslipidemia/hypertriglyceridemia/hyperlipidemia in a subject. This attenuation may be exemplified by, for example, a decrease in one or more aspects (e.g., symptoms, tissue characteristics, and cellular, inflammatory, or immunological activity, etc.) of AH, ALD, cirrhosis, HCC, CCA, PSC, NAFLD, and NASH, as well as related diseases, disorders, and conditions in an individual when they might otherwise be expected.

[0080] As used herein, “complementary” means a structural relationship between two nucleotides (e.g., on two opposing nucleic acids or on opposing regions of a single nucleic acid strand) that permits the two nucleotides to form base pairs with one another. For example, a purine nucleotide of one nucleic acid that is complementary to a pyrimidine nucleotide of an opposing nucleic acid may base pair together by forming hydrogen bonds with one another. Complementary nucleotides can base pair in the Watson-Crick manner or in any other manner that allows for the formation of stable duplexes. Likewise, two nucleic acids may have regions of multiple nucleotides that are complementary with each other to form regions of complementarity, as described herein.

[0081] As used herein, “contact,” “contacting” and the like means directly or indirectly introducing or delivering the RNAi into, for example, a cell by facilitating or effecting uptake or absorption into the cell.

[0082] As used herein, “deoxyribonucleotide” means a nucleotide having a hydrogen in place of a hydroxyl at the 2′ position of its pentose sugar when compared with a ribonucleotide. A modified deoxyribonucleotide has one or more modifications substitutions of atoms other than at the 2′ position, including modifications or substitutions in or of the nucleobase, sugar, or phosphate group.

[0083] As used herein, “double-stranded oligonucleotide” or “ds oligonucleotide” means an oligonucleotide that is substantially in a duplex form. The complementary base-pairing of duplex region(s) of a ds oligonucleotide can be formed between antiparallel sequences of nucleotides of covalently separate nucleic acid strands. Likewise, complementary base-pairing of duplex region(s) of a ds oligonucleotide can be formed between antiparallel sequences of nucleotides of nucleic acid strands that are covalently linked. Moreover, complementary base-pairing of duplex region(s) of a ds oligonucleotide can be formed from single nucleic acid strand that is folded (e.g., via a hairpin) to provide complementary antiparallel sequences of nucleotides that base pair together. A ds oligonucleotide can include two covalently separate nucleic acid strands that are fully duplexed with one another. However, a ds oligonucleotide can include two covalently separate nucleic acid strands that are partially duplexed (e.g., having overhangs at one or both ends). A ds oligonucleotide can include an antiparallel sequence of nucleotides that are partially complementary, and thus, may have one or more mismatches, which may include internal mismatches or end mismatches.

[0084] As used herein, “duplex,” in reference to nucleic acids (e.g., oligonucleotides), means a structure formed through complementary base pairing of two antiparallel sequences of nucleotides.

[0085] As used herein, “excipient” means a non-therapeutic agent that may be included in a composition herein, for example, to provide or contribute to a desired consistency or stabilizing effect.

[0086] As used herein, “hepatocyte” or “hepatocytes” means cells of the parenchymal tissues of the liver. These cells make up about 70%-85% of the liver's mass and manufacture serum albumin, fibronectin (FBN) and the prothrombin group of clotting factors (except for Factors 3 and 4). Markers for hepatocyte lineage cells include, but are not limited to, transthyretin (Ttr), glutamine synthetase (Glul), hepatocyte nuclear factor 1a (Hnf1a) and hepatocyte nuclear factor 4a (Hnf4a). Markers for mature hepatocytes may include, but are not limited to, cytochrome P450 (Cyp3a11), fumarylacetoacetate hydrolase (Fah), glucose 6-phosphate (G6p), albumin (Alb) and OC2-2F8. See, e.g., Huch et al. (2013) NATURE 494:247-50.

[0087] As used herein, a “hepatotoxic agent” means a chemical compound, virus or other substance that is itself toxic to the liver or can be processed to form a metabolite that is toxic to the liver. Hepatotoxic agents may include, but are not limited to, carbon tetrachloride (CCl₄), acetaminophen (paracetamol), vinyl chloride, arsenic, chloroform, nonsteroidal anti-inflammatory drugs (such as aspirin and phenylbutazone).

[0088] As used herein, “labile linker” means a linker that can be cleaved (e.g., by acidic pH). Likewise, “fairly stable linker” means a linker that cannot be cleaved.

[0089] As used herein, “liver inflammation” or “hepatitis” means a physical condition in which the liver becomes swollen, dysfunctional and/or painful, especially as a result of injury or infection, as may be caused by exposure to a hepatotoxic agent. Symptoms may include jaundice, fatigue, weakness, nausea, vomiting, appetite reduction and weight loss. Liver inflammation, if left untreated, may progress to fibrosis, cirrhosis, liver failure or liver cancer.

[0090] As used herein, “liver fibrosis,” “hepatic fibrosis” or “fibrosis of the liver” refers to an excessive accumulation in the liver of extracellular matrix proteins, which could include collagens (I, III, and IV), FBN, undulin, elastin, laminin, hyaluronan, and proteoglycans resulting from inflammation and liver cell death. Liver fibrosis, if left untreated, may progress to cirrhosis, liver failure or liver cancer.

[0091] As used herein, “loop” means an unpaired region of a nucleic acid (e.g., oligonucleotide) that is flanked by two antiparallel regions of the nucleic acid that are sufficiently complementary to one another, such that under appropriate hybridization conditions (e.g., in a phosphate buffer, in a cells), the two antiparallel regions, which flank the unpaired region, hybridize to form a duplex (referred to as a “stem”).

[0092] As used herein, “modified internucleotide linkage” means an internucleotide linkage having one or more chemical modifications when compared with a reference internucleotide linkage having a phosphodiester bond. A modified nucleotide can be a non-naturally occurring linkage. Typically, a modified internucleotide linkage confers one or more desirable properties to a nucleic acid in which the modified internucleotide linkage is present. For example, a modified nucleotide may improve thermal stability, resistance to degradation, nuclease resistance, solubility, bioavailability, bioactivity, reduced immunogenicity, etc.

[0093] As used herein, “modified nucleotide” refers to a nucleotide having one or more chemical modifications when compared with a corresponding reference nucleotide selected from: adenine ribonucleotide, guanine ribonucleotide, cytosine ribonucleotide, uracil ribonucleotide, adenine deoxyribonucleotide, guanine deoxyribonucleotide, cytosine deoxyribonucleotide, and thymidine deoxyribonucleotide. A modified nucleotide can be a non-naturally occurring nucleotide. A modified nucleotide can have, for example, one or more chemical modification in its sugar, nucleobase, and/or phosphate group. Additionally, or alternatively, a modified nucleotide can have one or more chemical moieties conjugated to a corresponding reference nucleotide. Typically, a modified nucleotide confers one or more desirable properties to a nucleic acid in which the modified nucleotide is present. For example, a modified nucleotide may improve thermal stability, resistance to degradation, nuclease resistance, solubility, bioavailability, bioactivity, reduced immunogenicity, etc.

[0094] As used herein, “nicked tetraloop structure” mean a structure of a RNAi oligonucleotide that is characterized by separate sense (passenger) and antisense (guide) strands, in which the sense strand has a region of complementarity with the antisense strand, and in which at least one of the strands, generally the sense strand, has a tetraloop configured to stabilize an adjacent stem region formed within the at least one strand.

[0095] As used herein, “nucleotide” means an organic molecule having a nucleoside (a nucleobase such as, for example, adenine, cytosine, guanine, thymine, or uracil; and a pentose sugar such as, for example, ribose or 2′-deoxyribose; and a phosphate group, which can serve as a monomeric unit of nucleic acid polymers such as deoxyribonucleic acid (DNA) and ribonucleic acid (RNA).

[0096] As used herein, “oligonucleotide” means a short nucleic acid molecule (e.g., less than about 100 nucleotides in length). An oligonucleotide may be single-stranded (ss) or ds. An oligonucleotide may or may not have duplex regions. As a set of non-limiting examples, an oligonucleotide may be, but is not limited to, a small interfering RNA (siRNA), microRNA (miRNA), short hairpin RNA (shRNA), dicer substrate interfering RNA (dsiRNA), antisense oligonucleotide (ASO), short siRNA, or ss siRNA. Typically, a ds oligonucleotide is a RNAi oligonucleotide.

[0097] As used herein, “overhang” means a terminal non-base pairing nucleotide(s) resulting from one strand or region extending beyond the terminus of a complementary strand with which the one strand or region forms a duplex. An overhang may include one or more unpaired nucleotides extending from a duplex region at the 5′ terminus or 3′ terminus of a ds oligonucleotide. The overhang can be a 3′ or 5′ overhang on the antisense strand or sense strand of a ds oligonucleotides.

[0098] As used herein, “phosphate analog” means a chemical moiety that mimics the electrostatic and/or steric properties of a phosphate group. In some embodiments, a phosphate analog is positioned at the 5′ terminal nucleotide of an oligonucleotide in place of a 5′-phosphate, which is often susceptible to enzymatic removal. A 5′ phosphate analog can include a phosphatase-resistant linkage. Examples of phosphate analogs include, but are not limited to, 5′ phosphonates, such as 5′ methylene phosphonate (5′-MP) and 5′-(E)-vinylphosphonate (5′-VP). An oligonucleotide can have a phosphate analog at a 4′-carbon position of the sugar (referred to as a “4′-phosphate analog”) at a 5′-terminal nucleotide. An example of a 4′-phosphate analog is oxymethylphosphonate, in which the oxygen atom of the oxymethyl group is bound to the sugar moiety (e.g., at its 4′-carbon) or analog thereof. See, e.g., Intl. Patent Application Publication No. WO 2018/045317. Other modifications have been developed for the 5′ end of oligonucleotides (see, e.g., Intl. Patent Application No. WO 2011/133871; U.S. Pat. No. 8,927,513; and Prakash et al. (2015) NUCLEIC ACIDS RES. 43:2993-3011).

[0099] As used herein, “PNPLA3-associated disease,” “PNPLA3-associated disorder” or “PNPLA3-associated condition” means conditions where increased PNPLA3 expression and/or the presence of, for example, the PNPLA3 I148M variant. Exemplary PNPLA3-associated conditions, diseases or disorders include, but are not limited to, accumulation of fat in the liver, cirrhosis of the liver, fatty liver (steatosis), hepatocellular necrosis, HCC, liver fibrosis, inflammation of the liver, NASH, NAFLD, or obesity.

[0100] As used herein, “reduced expression,” and with respect to a gene (e.g., PNPLA3) means a decrease in the amount or level of RNA transcript (e.g., PNPLA3 mRNA) or protein encoded by the gene and/or a decrease in the amount or level of activity of the gene in a cell, a population of cells, a sample, or a subject, when compared to an appropriate reference (e.g., a reference cell, population of cells, sample, or subject). For example, the act of contacting a cell with an oligonucleotide herein (e.g., an oligonucleotide having an antisense strand having a nucleotide sequence that is complementary to a nucleotide sequence including PNPLA3 mRNA) may result in a decrease in the amount or level of mRNA, protein, and/or activity (e.g., via degradation of PNPLA3 mRNA by the RNAi pathway) when compared to a cell that is not treated with the ds oligonucleotide. Similarly, and as used herein, “reducing expression” means an act that results in reduced expression of a gene (e.g., PNPLA3). Specifically, and as used herein, “reduction of PNPLA3 expression” means a decrease in the amount or level of PNPLA3 mRNA, PMPLA3 protein, and/or PNPLA3 activity in a cell, a population of cells, a sample, or a subject when compared to an appropriate reference (e.g., a reference cell, population of cells, tissue, or subject).

[0101] As used herein, “region of complementarity” means a sequence of nucleotides of a nucleic acid (e.g., a ds oligonucleotide) that is sufficiently complementary to an antiparallel sequence of nucleotides to permit hybridization between the two sequences of nucleotides under appropriate hybridization conditions (e.g., in a phosphate buffer, in a cell, etc.). An oligonucleotide herein includes a targeting sequence having a region of complementary to a mRNA target sequence.

[0102] As used herein, “ribonucleotide” means a nucleotide having a ribose as its pentose sugar, which contains a hydroxyl group at its 2′ position. A modified ribonucleotide is a ribonucleotide having one or more modifications or substitutions of atoms other than at the 2′ position, including modifications or substitutions in or of the nucleobase, sugar, or phosphate group.

[0103] As used herein, “RNAi oligonucleotide” refers to either (a) a ds oligonucleotide having a sense strand (passenger) and antisense strand (guide), in which the antisense strand or part of the antisense strand is used by the Argonaute 2 (Ago2) endonuclease in the cleavage of a target mRNA or (b) a ss oligonucleotide having a single antisense strand, where that antisense strand (or part of that antisense strand) is used by the Ago2 endonuclease in the cleavage of a target mRNA.

[0104] As used herein, “strand” refers to a single, contiguous sequence of nucleotides linked together through internucleotide linkages (e.g., phosphodiester linkages or phosphorothioate linkages). A strand can have two free ends (e.g., a 5′ end and a 3′ end).

[0105] As used herein, “subject” means any mammal, including cats, dogs, mice, rats, and primates, especially humans. Moreover, “individual” or “patient” may be used interchangeably with “subject.”

[0106] As used herein, “synthetic” refers to a nucleic acid or other molecule that is artificially synthesized (e.g., using a machine such as, for example, a solid-state nucleic acid synthesizer) or that is otherwise not derived from a natural source (e.g., a cell or organism) that normally produces the nucleic acid or other molecule.

[0107] As used herein, “targeting ligand” means a molecule (e.g., an amino sugar, carbohydrate, cholesterol, lipid, or polypeptide) that selectively binds to a cognate molecule (e.g., a receptor) of a tissue or cell of interest and that is conjugatable to another substance for targeting another substance to the tissue or cell of interest. For example, a targeting ligand may be conjugated to an oligonucleotide herein for purposes of targeting the oligonucleotide to a specific tissue or cell of interest. A targeting ligand can selectively bind to a cell surface receptor. Accordingly, a targeting ligand, when conjugated to an oligonucleotide, facilitates delivery of the oligonucleotide into a particular cell through selective binding to a receptor expressed on the surface of the cell and endosomal internalization by the cell of the complex comprising the oligonucleotide, targeting ligand, and receptor. Moreover, a targeting ligand can be conjugated to an oligonucleotide via a linker that is cleaved following or during cellular internalization such that the oligonucleotide is released from the targeting ligand in the cell.

[0108] As used herein, “tetraloop” means a loop that increases stability of an adjacent duplex formed by hybridization of flanking sequences of nucleotides. The increase in stability is detectable as an increase in melting temperature (Tₘ) of an adjacent stem duplex that is higher than the Tₘ of the adjacent stem duplex expected, on average, from a set of loops of comparable length consisting of randomly selected sequences of nucleotides. For example, a tetraloop can confer a Tₘ of at least about 50° C., at least about 55° C., at least about 56° C., at least about 58° C., at least about 60° C., at least about 65° C., or at least about 75° C. in 10 mM NaHPO₄ to a hairpin comprising a duplex of at least 2 base pairs (bp) in length. A tetraloop also may stabilize a bp in an adjacent stem duplex by stacking interactions. Additionally, interactions among the nucleotides in a tetraloop include, but are not limited to, non-Watson-Crick base pairing, stacking interactions, hydrogen bonding, and contact interactions (Cheong et al. (1990) NATURE 346:680-682; Heus & Pardi (1991) SCIENCE 253:191-194). Here, a tetraloop can include or can have about 3 to 6 nucleotides, and typically is about 4 to 5 nucleotides. A tetraloop therefore can have 3, 4, 5, or 6 nucleotides, which may or may not be modified (e.g., which may or may not be conjugated to a targeting moiety), especially 4 nucleotides. Any nucleotide may be used in the tetraloop, and standard IUPAC-IUB symbols for such nucleotides may be used as described in Cornish-Bowden (1985) NUCLEIC ACIDS RES. 13:3021-30. For example, the letter “N” may be used to mean that any base may be in that position, the letter “R” may be used to show that A (adenine) or G (guanine) may be in that position, and “B” may be used to show that C (cytosine), G (guanine), or T (thymine) may be in that position. Examples of tetraloops include the UNCG family of tetraloops (e.g., UUCG), the GNRA family of tetraloops (e.g., GAAA) and the CUUG tetraloop (Woese et al. (1990) PROC. NATL. ACAD. SCI. USA 87:8467-71; Antao et al. (1991) NUCLEIC ACIDS RES. 19:5901-05). Examples of DNA tetraloops include the d(GNNA) family of tetraloops (e.g., d(GTTA)), the d(GNRA) family of tetraloops, the d(GNAB) family of tetraloops, the d(CNNG) family of tetraloops, and the d(TNCG) family of tetraloops (e.g., d(TTCG)). See, e.g., Nakano et al. (2002) BIOCHEM. 41:4281-92; and Shinji et al. (2000) NIPPON KAGAKKAI KOEN YOKOSHU 78:731. Here, the tetraloop can be within a nicked tetraloop structure.

[0109] As used herein, “treat” or “treating” means an act of providing care to an individual in need thereof, for example, by administering a therapeutic agent (e.g., an oligonucleotide herein) to the individual for purposes of improving the health and/or well-being of the individual with respect to an existing condition (e.g., a disease, disorder) or to prevent or decrease the likelihood of the occurrence of a condition. Treating also can involve reducing the frequency or severity of at least one sign, symptom or contributing factor of a condition (e.g., disease, disorder) experienced by the individual.

[0110] As used herein, “iRNA,” “iRNA agent,” “RNAi,” “RNAi agent” and “RNA interference agent” means an agent that contains RNA and that mediates the targeted cleavage of an RNA transcript via an RNA-induced silencing complex (RISC) pathway. iRNA directs sequence-specific degradation of mRNA via RNA interference. The iRNA modulates, inhibits, or reduces PNPLA3 expression in a cell.

### Compositions

[0111] According to some aspects, the disclosure provides oligonucleotides (e.g., double-stranded RNAi oligonucleotides) that reduce, modulate, or inhibit expression of PNPLA3 in the liver. In some embodiments, the oligonucleotides provided herein used to treat of diseases associated with PNPLA3 expression. In some aspects, the disclosure provides methods of treatment a disease associated with PNPLA3 expression by reducing, modulating, or inhibiting PNPLA3 expression in the liver (e.g., in cells comprising the liver).

### Oligonucleotide Inhibitors of PNPLA3 Expression

[0112] I. PNPLA3 Target Sequences: The oligonucleotides herein (e.g., RNAi oligonucleotides) are targeted to a target sequence comprising PNPLA3 mRNA (i.e., a PNPLA3 target sequence). In some embodiments, the oligonucleotide or a portion, fragment, or strand thereof (e.g., an antisense strand or a guide strand of a ds RNAi oligonucleotide) binds or anneals to a PNPLA3 target sequence, thereby inhibiting PNPLA3 expression. In some embodiments, the oligonucleotide is targeted to a PNPLA3 target sequence for inhibiting PNPLA3 expression in vivo. In some embodiments, the amount or extent of PNPLA3 expression inhibition by an oligonucleotide targeted to a PNPLA3 target sequence correlates with the potency of the oligonucleotide. In some embodiments, the amount or extent of inhibition of PNPLA3 expression by an oligonucleotide targeted to a PNPLA3 target sequence correlates with the amount or extent of therapeutic benefit in an individual having or suspected of having a disease, disorder, or condition associated with PNPLA3 expression treated with the oligonucleotide.

[0113] Through examining and analyzing the nucleotide sequence of PNPLA3 mRNAs, including mRNAs of multiple different species (e.g., human, cynomolgus monkey, and rhesus monkey; see, e.g., Example 1) and as a result of in vitro and in vivo testing (see, e.g., Examples 2-3), it is shown herein that certain nucleotide sequences of PNPLA3 mRNA are more amenable than others to oligonucleotide-based inhibition of PNPLA3 expression and are thus useful as target sequences for the oligonucleotides herein. In some embodiments, a sense strand of an oligonucleotide (e.g., a ds RNAi oligonucleotide) described herein (e.g., in Tables 1 or 3, or tables A, B, C or D) comprises a PNPLA3 target sequence. In some embodiments, a portion or region of the sense strand of an oligonucleotide described herein (e.g., in Tables 1 or 3, or tables A, B, C or D) comprises a PNPLA3 target sequence. In some embodiments, the PNPLA3 target sequence comprises, or consists of, a sequence of any one of SEQ ID NOs:1167 to 1176.

[0114] II. PNPLA3 mRNA Targeting Sequences: In some embodiments, the oligonucleotides herein have regions of complementarity to PNPLA3 mRNA (e.g., within a target sequence of PNPLA3 mRNA) for targeting PNPLA3 mRNA in cells and inhibiting PNPLA3 expression. In some embodiments, the oligonucleotides herein comprise a PNPLA3 targeting sequence (e.g., an antisense strand or a guide strand of a ds oligonucleotide) having a region of complementarity that binds or anneals to a PNPLA3 mRNA target sequence by complementary (Watson-Crick) base pairing. The targeting sequence or region of complementarity is of a suitable length and base content to enable binding or annealing of the oligonucleotide (or a strand thereof) to PNPLA3 mRNA for inhibiting its expression. In some embodiments, the targeting sequence or region of complementarity is at least about 12, at least about 13, at least about 14, at least about 15, at least about 16, at least about 17, at least about 18, at least about 19, at least about 20, at least about 21, at least about 22, at least about 23, at least about 24, at least about 25, at least about 26, at least about 27, at least about 28, at least about 29, or at least about 30 nucleotides in length. Alternatively, the targeting sequence or region of complementarity is about 12 to about 30 (e.g., 12 to 30, 12 to 22, 15 to 25, 17 to 21, 18 to 27, 19 to 27, or 15 to 30) nucleotides in length. Alternatively, the targeting sequence or region of complementarity is about 12, 13, 14, 15, 16, 17, 18, 19, 20, 21, 22, 23, 24, 25, 26, 27, 28, 29, or 30 nucleotides in length. In certain embodiments, the targeting sequence or region of complementarity is 18 nucleotides in length. In certain embodiments, the targeting sequence or region of complementarity is 19 nucleotides in length. In certain embodiments, the targeting sequence or region of complementarity is 20 nucleotides in length. In certain embodiments, the targeting sequence or region of complementarity is 21 nucleotides in length. In certain embodiments, the targeting sequence or region of complementarity is 22 nucleotides in length. In certain embodiments, the targeting sequence or region of complementarity is 23 nucleotides in length. In certain embodiments, the targeting sequence or region of complementarity is 24 nucleotides in length.

[0115] In some embodiments, the oligonucleotides herein comprise a targeting sequence or a region of complementarity (e.g., an antisense strand or a guide strand of a double-stranded oligonucleotide) that is fully complementary to PNPLA3 target sequence. In some embodiments, the targeting sequence or region of complementarity is partially complementary to a PNPLA3 target sequence. In some embodiments, the oligonucleotide comprises a targeting sequence or region of complementarity that is fully complementary to a sequence of any one of SEQ ID NOs: 1167 to 1176. In some embodiments, the oligonucleotide comprises a targeting sequence or region of complementarity that is partially complementary to a sequence of any one of SEQ ID NOs: 1167 to 1176.

[0116] Alternatively, in some embodiments, the oligonucleotides herein comprise a targeting sequence or region of complementarity that is complementary to a contiguous sequence of nucleotides comprising a PNPLA3 mRNA, wherein the contiguous sequence of nucleotides is about 12 to about 30 nucleotides in length (e.g., 12 to 30, 12 to 28, 12 to 26, 12 to 24, 12 to 20, 12 to 18, 12 to 16, 14 to 22, 16 to 20, 18 to 20, or 18 to 19 nucleotides in length). In some embodiments, the oligonucleotides comprise a targeting sequence or region of complementarity that is complementary to a contiguous sequence of nucleotides comprising a PNPLA3 mRNA, where the contiguous sequence of nucleotides is 10, 11, 12, 13, 14, 15, 16, 17, 18, 19, or 20 nucleotides in length. In some embodiments, the oligonucleotides comprise a targeting sequence or region of complementarity that is complementary to a contiguous sequence of nucleotides comprising a PNPLA3 mRNA, where the contiguous sequence of nucleotides is 19 nucleotides in length. In some embodiments, the oligonucleotides comprise a targeting sequence or region of complementarity that is complementary to a contiguous sequence of nucleotides comprising a PNPLA3 mRNA, where the contiguous sequence of nucleotides is 20 nucleotides in length. In other embodiments, the oligonucleotides comprise a targeting sequence or a region of complementarity that is complementary to a contiguous sequence of nucleotides of any one of SEQ ID NOs: 1167 to 1176, optionally where the contiguous sequence of nucleotides is 19 nucleotides in length.

[0117] With regard to the targeting sequence or region of complementarity of the oligonucleotides herein, it is complementary to contiguous nucleotides of a sequence as set forth in any one of SEQ ID NOs: 1167 to 1176 and spans the entire length of an antisense strand. In some embodiments, the region of complementarity of the oligonucleotides is complementary to contiguous nucleotides of a sequence as set forth in any one of SEQ ID NOs: 1167 to 1176 and spans a portion of the entire length of an antisense strand. In some additional embodiments, the oligonucleotides include a region of complementarity (e.g., on an antisense strand of a ds oligonucleotide) that is at least partially (e.g., fully) complementary to a contiguous stretch of nucleotides spanning nucleotides 1-20 of a sequence as set forth in any one of SEQ ID NOs: 1167 to 1176.

[0118] Alternatively, the oligonucleotides herein comprise a targeting sequence or region of complementarity having one or more base pair (bp) mismatches with the corresponding PNPLA3 target sequence. In some embodiments, the targeting sequence or region of complementarity is up to about 1, up to about 2, up to about 3, up to about 4, up to about 5, etc. mismatches with the corresponding PNPLA3 target sequence provided that the ability of the targeting sequence or region of complementarity to bind or anneal to the PNPLA3 mRNA under appropriate hybridization conditions and/or the ability of the oligonucleotide to reduce or inhibit PNPLA3 expression is maintained. Stated differently, the targeting sequence or region of complementarity is no more than 1, no more than 2, no more than 3, no more than 4, or no more than 5 mismatches with the corresponding PNPLA3 target sequence provided that the ability of the targeting sequence or region of complementarity to bind or anneal to the PNPLA3 mRNA under appropriate hybridization conditions and/or the ability of the oligonucleotides to reduce or inhibit PNPLA3 expression is maintained. In some embodiments, the oligonucleotides comprise a targeting sequence or region of complementarity having 1 mismatch with the corresponding target sequence. In some embodiments, the oligonucleotides comprise a targeting sequence or region of complementarity having 2 mismatches with the corresponding target sequence. In some embodiments, the oligonucleotides comprise a targeting sequence or a region of complementarity having 3 mismatches with the corresponding target sequence. In some embodiments, the oligonucleotides comprise a targeting sequence or region of complementarity having 4 mismatches with the corresponding target sequence. In some embodiments, the oligonucleotides comprise a targeting sequence or region of complementarity having 5 mismatches with the corresponding target sequence. In other embodiments, the oligonucleotides comprise a targeting sequence or a region of complementarity more than one mismatch (e.g., 2, 3, 4, 5 or more mismatches) with the corresponding target sequence, where at least 2 (e.g., all) of the mismatches are positioned consecutively (e.g., 2, 3, 4, 5 or more mismatches in a row), or where the mismatches are interspersed in any position throughout the targeting sequence or region of complementarity. In other embodiments, the oligonucleotides comprise a targeting sequence or region of complementarity more than one mismatch (e.g., 2, 3, 4, 5 or more mismatches) with the corresponding target sequence, where at least 2 (e.g., all) of the mismatches are positioned consecutively (e.g., 2, 3, 4, 5 or more mismatches in a row), or where at least one or more non-mismatched base pair is located between the mismatches, or a combination thereof.

[0119] III. Types of Oligonucleotides: A variety of oligonucleotide types and/or structures are useful for targeting PNPLA3 mRNA including, but not limited to, RNAi oligonucleotides, antisense oligonucleotides, miRNAs, etc. Any of the oligonucleotide types described herein or elsewhere are contemplated for use as a framework to incorporate a targeting sequence herein for the purposes of inhibiting PNPLA3 expression. In some embodiments, the oligonucleotides herein inhibit PNPLA3 expression by engaging with RNAi pathways upstream or downstream of Dicer involvement. For example, RNAi oligonucleotides have been developed with each strand having sizes of about 19-25 nucleotides with at least one 3′ overhang of 1 to 5 nucleotides (see, e.g., U.S. Pat. No. 8,372,968). Longer oligonucleotides also have been developed that are processed by Dicer to generate active RNAi products (see, e.g., U.S. Pat. No. 8,883,996). Further work produced extended ds oligonucleotides where at least one end of at least one strand is extended beyond a duplex targeting region, including structures where one of the strands includes a thermodynamically stabilizing tetraloop structure (see, e.g., U.S. Pat. Nos. 8,513,207 and 8,927,705, as well as Intl. Patent Application Publication No. WO 2010/033225). Such structures include ss extensions (on one or both sides of the molecule) as well as ds extensions.

[0120] The oligonucleotides herein engage with the RNAi pathway downstream of the involvement of Dicer (e.g., Dicer cleavage). In some embodiments, the oligonucleotides have an overhang (e.g., of 1, 2, or 3 nucleotides in length) in the 3′ end of the sense strand. In some embodiments, the oligonucleotides (e.g., siRNA) include a 21-nucleotide guide strand that is antisense to a target mRNA (e.g., PNPLA3 mRNA) and a complementary passenger strand, in which both strands anneal to form a 19-bp duplex and 2 nucleotide overhangs at either or both 3′ ends. Longer oligonucleotide designs also are contemplated, including oligonucleotides having a guide strand of 23 nucleotides and a passenger strand of 21 nucleotides, where there is a blunt end on the right side of the molecule (3′ end of passenger strand/5′ end of guide strand) and a two nucleotide 3′-guide strand overhang on the left side of the molecule (5′ end of the passenger strand/3′ end of the guide strand). In such molecules, there is a 21 bp duplex region. See, e.g., U.S. Pat. Nos. 9,012,138; 9,012,621 and 9,193,753.

[0121] The oligonucleotides herein comprise sense and antisense strands that are both in the range of about 17 to about 26 (e.g., 17 to 26, 20 to 25, or 21-23) nucleotides in length. In some embodiments, the oligonucleotides comprise a sense and antisense strand that are both in the range of about 19 to about 22 nucleotides in length. In some embodiments, the sense and antisense strands are of equal length. In some embodiments, the oligonucleotides comprise sense and antisense strands, such that there is a 3′-overhang on either the sense strand or the antisense strand, or both the sense and antisense strand. In some instances, for oligonucleotides having sense and antisense strands that are both in the range of about 21 to about 23 nucleotides in length, a 3′-overhang on the sense, antisense or both sense and antisense strands is 1 or 2 nucleotides in length. In some embodiments, the oligonucleotides comprise a guide strand of 22 nucleotides and a passenger strand of 20 nucleotides, where there is a blunt end on the right side of the molecule (3′ end of passenger strand/5′ end of guide strand) and a 2 nucleotide 3′ guide strand overhang on the left side of the molecule (5′ end of the passenger strand/3′ end of the guide strand). In such molecules, there is a 20-bp duplex region.

[0122] Other oligonucleotide designs for use herein include: 16-mer siRNAs (see, e.g., “NUCLEIC ACIDS IN CHEMISTRY & BIOLOGY,” Blackburn (ed.), Royal Society of Chemistry, 2006), shRNAs (e.g., having 19 bp or shorter stems; see, e.g., Moore et al. (2010) METHODS MOL. BIOL. 629:141-58), blunt siRNAs (e.g., of 19 bps in length; see, e.g., Kraynack & Baker (2006) RNA 12:163-76), asymmetrical siRNAs (aiRNA; see, e.g., Sun et al. (2008) NAT. BIOTECHNOL. 26:1379-82), asymmetric shorter-duplex siRNA (see, e.g., Chang et al. (2009) MOL. THER. 17:725-32), fork siRNAs (see, e.g., Hohjoh (2004) FEBS LETT. 557:193-198), ss siRNAs (see, e.g., Elsner (2012) NAT. BIOTECHNOL. 30:1063), dumbbell-shaped circular siRNAs (see, e.g., Abe et al. (2007) J. AM. CHEM. SOC. 129:15108-09), and small internally segmented interfering RNA (sisiRNA; see, e.g., Bramsen et al. (2007) NUCLEIC ACIDS RES. 35:5886-97). Further non-limiting examples of oligonucleotide structures that may be used herein to reduce or inhibit PNPLA3 expression are miRNA, shRNA, and short siRNA (see, e.g., Hamilton et al. (2002) EMBO J. 21:4671-79; see also, US Patent Application Publication No. 2009/0099115).

[0123] Alternatively, the oligonucleotides herein are single-stranded (ss). Such structures include, but are not limited to, ss RNAi molecules. Recent efforts have demonstrated the activity of ss RNAi molecules (see, e.g., Matsui et al. (2016) MOL. THER. 24:946-55). In some embodiments, the oligonucleotides are ASOs. An ASO is a ss oligonucleotide that has a nucleobase sequence which, when written or depicted in the 5′ to 3′ direction, includes a reverse complement of a targeted segment of a particular nucleic acid and is suitably modified (e.g., as a gapmer) to induce RNaseH-mediated cleavage of its target RNA in cells or (e.g., as a mixmer) so as to inhibit translation of the target mRNA in cells. ASOs for use herein are modified in any suitable manner known in the art including, for example, as shown in U.S. Pat. No. 9,567,587 (including, for example, length, sugar moieties of the nucleobase (pyrimidine, purine), and alterations of the heterocyclic portion of the nucleobase). Further, ASOs have been used for decades to reduce expression of specific target genes (see, e.g., Bennett et al. (2017) ANNU. REV. PHARMACOL. 57:81-105).

[0124] IV. Double-Stranded RNAi Oligonucleotides: ds oligonucleotides for targeting PNPLA3 mRNA and inhibiting PNPLA3 expression (e.g., via the RNAi pathway) comprising a sense strand (i.e., a passenger strand) and an antisense strand (i.e., a guide strand). In some embodiments, the sense strand and antisense strand are separate strands and are not covalently linked. In some embodiments, the sense strand and antisense strand are covalently linked.

[0125] In some embodiments, the sense strand comprises a first region (R1) and a second region (R2), where R2 comprises a first subregion (S1), a tetraloop (L) or triloop (triL), and a second subregion (S2), where L or triL is located between S1 and S2, and where S1 and S2 form a second duplex (D2). D2 has various lengths. In some embodiments, D2 is about 1 to about 6 bp in length. In some embodiments, D2 is 2-6, 3-6, 4-6, 5-6, 1-5, 2-5, 3-5 or 4-5 bp in length. In other embodiments, D2 is 1, 2, 3, 4, 5 or 6 bp in length. In certain embodiments, D2 is 6 bp in length.

[0126] In some embodiments, R1 of the sense strand and the antisense strand forms a first duplex (D1). In some embodiments, D1 is at least about 15 (e.g., at least 15, at least 16, at least 17, at least 18, at least 19, at least 20 or at least 21) nucleotides in length. In some embodiments, D1 is about 12 to about 30 nucleotides in length (e.g., 12 to 30, 12 to 27, 15 to 22, 18 to 22, 18 to 25, 18 to 27, 18 to 30 or 21 to 30 nucleotides in length). In other embodiments, D1 is at least 12 nucleotides in length (e.g., at least 12, at least 15, at least 20, at least 25 or at least 30 nucleotides in length). In other embodiments, D1 is 12, 13, 14, 15, 16, 17, 18, 19, 20, 21, 22, 23, 24, 25, 26, 27, 28, 29 or 30 nucleotides in length. In certain embodiments, D1 is 20 nucleotides in length. In some instances, D1 does not span the entire length of the sense strand and/or antisense strand. In some instances, D1 spans the entire length of either the sense strand or antisense strand or both. In certain instances, D1 spans the entire length of both the sense strand and the antisense strand.

[0127] In certain instances, a ds oligonucleotide herein includes a sense strand having a sequence of any one of SEQ ID NOs: 9, 11, 13, 15, 17, 19, 21, 23, 25, 27, 29, 31, 33, 35, 37, 39, 41, 43, 45, 47, 49, 51, 53, 55, 57, 59, 61, 63, 65, 67, 69, 71, 73, 75, 77, 79, 81, 83, 85, 87, 89, 91, 93, 95, 97, 99, 101, 103, 105, 107, 109, 111, 113, 115, 117, 119, 121, 123, 125, 127, 129, 131, 133, 135, 137, 139, 141, 143, 145, 147, 149, 151, 153, 155, 157, 159, 161, 163, 165, 167, 169, 171, 173, 175, 177, 179, 181, 183, 185, 187, 189, 191, 193, 195, 197, 199, 201, 203, 205, 207, 209, 211, 213, 215, 217, 219, 221, 223, 225, 227, 229, 231, 233, 235, 237, 239, 241, 243, 245, 247, 249, 251, 253, 255, 257, 259, 261, 263, 265, 267, 269, 271, 273, 275, 277, 279, 281, 283, 285, 287, 289, 291, 293, 295, 297, 299, 301, 303, 305, 307, 309, 311, 313, 315, 317, 319, 321, 323, 325, 327, 329, 331, 333, 335, 337, 339, 341, 343, 345, 347, 349, 351, 353, 355, 357, 359, 361, 363, 365, 367, 369, 371, 373, 375, 377, 379, 381, 383, 385, 387, 389, 391, 393, 395, 397, 399, 401, 403, 405, 407, 409, 411, 413, 415, 417, 419, 421, 423, 425, 427, 429, 431, 433, 435, 437, 439, 441, 443, 445, 447, 449, 451, 453, 455, 457, 459, 461, 463, 465, 467, 469, 471, 473, 475, 477, 479, 481, 483, 485, 487, 489, 491, 493, 495, 497, 499, 501, 503, 505, 507, 509, 511, 513, 515, 517, 519, 521, 523, 525, 527, 529, 531, 533, 535, 537, 539, 541, 543, 545, 547, 549, 551, 553, 555, 557, 559, 561, 563, 565, 567, 569, 571, 573, 575, 577, 579, 581, 583, 585, 587, 589, 591, 593, 595, 597, 599, 601, 603, 605, 607, 609, 611, 613, 615, 617, 619, 621, 623, 625, 627, 629, 631, 633, 635, 637, 639, 641, 643, 645, 647, 649, 651, 653, 655, 657, 659, 661, 663, 665, 667, 669, 671, 673, 675, 677, 679, 681, 683, 685, 687, 689, 691, 693, 695, 697, 699, 701, 703, 705, 707, 709, 711, 713, 715, 717, 719, 721, 723, 725, 727, 729, 731, 733, 735, 737, 739, 741, 743, 745, 747, 749, 751, 753, 755, 757, 759, 761, 763, 765, 767, 769, 771, 773, and 775, and an antisense strand having a complementary sequence selected from SEQ ID NOs: 10, 12, 14, 16, 18, 20, 22, 24, 26, 28, 30, 32, 34, 36, 38, 40, 42, 44, 46, 48, 50, 52, 54, 56, 58, 60, 62, 64, 66, 68, 70, 72, 74, 76, 78, 80, 82, 84, 86, 88, 90, 92, 94, 96, 98, 100, 102, 104, 106, 108, 110, 112, 114, 116, 118, 120, 122, 124, 126, 128, 130, 132, 134, 136, 138, 140, 142, 144, 146, 148, 150, 152, 154, 156, 158, 160, 162, 164, 166, 168, 170, 172, 174, 176, 178, 180, 182, 184, 186, 188, 190, 192, 194, 196, 198, 200, 202, 204, 206, 208, 210, 212, 214, 216, 218, 220, 222, 224, 226, 228, 230, 232, 234, 236, 238, 240, 242, 244, 246, 248, 250, 252, 254, 256, 258, 260, 262, 264, 266, 268, 270, 272, 274, 276, 278, 280, 282, 284, 286, 288, 290, 292, 294, 296, 298, 300, 302, 304, 306, 308, 310, 312, 314, 316, 318, 320, 322, 324, 326, 328, 330, 332, 334, 336, 338, 340, 342, 344, 346, 348, 350, 352, 354, 356, 358, 360, 362, 364, 366, 368, 370, 372, 374, 376, 378, 380, 382, 384, 386, 388, 390, 392, 394, 396, 398, 400, 402, 404, 406, 408, 410, 412, 414, 416, 418, 420, 422, 424, 426, 428, 430, 432, 434, 436, 438, 440, 442, 444, 446, 448, 450, 452, 454, 456, 458, 460, 462, 464, 466, 468, 470, 472, 474, 476, 478, 480, 482, 484, 486, 488, 490, 492, 494, 496, 498, 500, 502, 504, 506, 508, 510, 512, 514, 516, 518, 520, 522, 524, 526, 528, 530, 532, 534, 536, 538, 540, 542, 544, 546, 548, 550, 552, 554, 556, 558, 560, 562, 564, 566, 568, 570, 572, 574, 576, 578, 580, 582, 584, 586, 588, 590, 592, 594, 596, 598, 600, 602, 604, 606, 608, 610, 612, 614, 616, 618, 620, 622, 624, 626, 628, 630, 632, 634, 636, 638, 640, 642, 644, 646, 648, 650, 652, 654, 656, 658, 660, 662, 664, 666, 668, 670, 672, 674, 676, 678, 680, 682, 684, 686, 688, 690, 692, 694, 696, 698, 700, 702, 704, 706, 708, 710, 712, 714, 716, 718, 720, 722, 724, 726, 728, 730, 732, 734, 736, 738, 740, 742, 744, 746, 748, 750, 752, 754, 756, 758, 760, 762, 764, 766, 768, 770, 772, 774, and 776, as is arranged in Table 1. Alternatively, a ds oligonucleotide herein includes a sense strand having a sequence of any one of SEQ ID NOs: 777, 779, 781, 783, 785, 787, 789, 791, 793, 795, 797, 799, 801, 803, 805, 807, 809, 811, 813, 815, 817, 819, 821, 823, 825, 827, 829, 831, 833, 835, 837, 839, 841, 843, 845, 847, 849, 851, 853, 855, 857, 859, 861, 863, 865, 867, 869, 871, 873, 875, 877, 879, 881, 883, 885, 887, 889, 891, 893, 895, 897, 899, 901, 903, 905, 907, 909, 911, 913, 915, 917, 919, 921, 923, 925, 927, 929, 931, 933, 935, 937, 939, 941, 943, 945, 947, 949, 951, 953, 955, 957, 959, 961, 963, 965, 967, 969, 971, 973, 975, 977, 979, 981, 983, 985, 987, 989, 991, 993, 995, 997, 999, 1001, 1003, 1005, 1007, 1009, 1011, 1013, 1015, 1017, 1019, 1021, 1023, 1025, 1027, 1029, 1031, 1033, 1035, 1037, 1039, 1041, 1043, 1045, 1047, 1049, 1051, 1053, 1055, 1057, 1059, 1061, 1063, 1065, 1067, 1069, 1071, 1073, 1075, 1077, 1079, 1081, 1083, 1085, 1087, 1089, 1091, 1093, 1095, 1097, 1099, 1101, 1103, 1105, 1107, 1109, 1111, 1113, 1115, 1117, 1119, 1121, 1123, 1125, 1127, 1129, 1131, 1133, 1135, 1137, 1139, 1141, 1143, 1145, 1147, 1149, 1151, 1153, 1155, 1157, 1159, 1161, and 1163, and an antisense strand having a complementary sequence selected from SEQ ID NOs: 778, 780, 782, 784, 786, 788, 790, 792, 794, 796, 798, 800, 802, 804, 806, 808, 810, 812, 814, 816, 818, 820, 822, 824, 826, 828, 830, 832, 834, 836, 838, 840, 842, 844, 846, 848, 850, 852, 854, 856, 858, 860, 862, 864, 866, 868, 870, 872, 874, 876, 878, 880, 882, 884, 886, 888, 890, 892, 894, 896, 898, 900, 902, 904, 906, 908, 910, 912, 914, 916, 918, 920, 922, 924, 926, 928, 930, 932, 934, 936, 938, 940, 942, 944, 946, 948, 950, 952, 954, 956, 958, 960, 962, 964, 966, 968, 970, 972, 974, 976, 978, 980, 982, 984, 986, 988, 990, 992, 994, 996, 998, 1000, 1002, 1004, 1006, 1008, 1010, 1012, 1014, 1016, 1018, 1020, 1022, 1024, 1026, 1028, 1030, 1032, 1034, 1036, 1038, 1040, 1042, 1044, 1046, 1048, 1050, 1052, 1054, 1056, 1058, 1060, 1062, 1064, 1066, 1068, 1070, 1072, 1074, 1076, 1078, 1080, 1082, 1084, 1086, 1088, 1090, 1092, 1094, 1096, 1098, 1100, 1102, 1104, 1106, 1108, 1110, 1112, 1114, 1116, 1118, 1120, 1122, 1124, 1126, 1128, 1130, 1132, 1134, 1136, 1138, 1140, 1142, 1144, 1146, 1148, 1150, 1152, 1154, 1156, 1158, 1160, 1162, and 1164, as is arranged in Table 3. In certain instances, the sense strand is any one of SEQ ID NOs: 787, 843, 867, 871, 937, 1003, 1007, 1017, 1161, or 1163, and the antisense strand is any one of SEQ ID NOs: 788, 844, 868, 872, 938, 1004, 1008, 1018, 1162, or 1164.

[0128] In certain embodiments, the disclosure describes RNAi oligonucleotides for reducing or inhibiting PNPLA3 expression that includes a sense strand having a sequence as set forth in Table A, B, C, or D (e.g., SEQ ID NOs: 1178, 1180, 1182, 1184, 1186, 1188, 1190, 1192, 1194, 1196, 1198, 1200, 1202, 1204, 1206, 1208, 1210, 1212, 1214, 1216, 1218, 1220, 1222, 1224, 1226, 1228, 1230, 1232, 1234, 1236, 1238, 1240, 1242, 1244, 1246, 1248, 1250, 1252, 1254, 1256, 1258, 1260, 1262, 1264, 1266, 1268, 1270, 1272, 1274, 1276, 1278, 1280, 1282, 1284, 1286, 1288, 1290, 1292, 1294, 1296, 1298, or 1300).

[0129] In certain embodiments, the disclosure describes RNAi oligonucleotides for reducing or inhibiting PNPLA3 expression that includes an antisense strand having a sequence as set forth in Table A, B, C, or D (e.g., SEQ ID NOs: 1179, 1181, 1183, 1185, 1187, 1189, 1191, 1193, 1195, 1197, 1199, 1201, 1203, 1205, 1207, 1209, 1211, 1213, 1215, 1217, 1219, 1221, 1223, 1225, 1227, 1229, 1231, 1233, 1235, 1237, 1239, 1241, 1243, 1245, 1247, 1249, 1251, 1253, 1255, 1257, 1259, 1261, 1263, 1265, 1267, 1269, 1271, 1273, 1275, 1277, 1279, 1281, 1283, 1285, 1287, 1289, 1291, 1293, 1295, 1297, 1299, or 1301). In certain embodiments, the disclosure describes RNAi oligonucleotides for reducing or inhibiting PNPLA3 expression that includes a sense strand having a sequence as set forth in Table A, B, C, or D (e.g., SEQ ID Nos: 1178, 1180, 1182, 1184, 1186, 1188, 1190, 1192, 1194, 1196, 1198, 1200, 1202, 1204, 1206, 1208, 1210, 1212, 1214, 1216, 1218, 1220, 1222, 1224, 1226, 1228, 1230, 1232, 1234, 1236, 1238, 1240, 1242, 1244, 1246, 1248, 1250, 1252, 1254, 1256, 1258, 1260, 1262, 1264, 1266, 1268, 1270, 1272, 1274, 1276, 1278, 1280, 1282, 1284, 1286, 1288, 1290, 1292, 1294, 1296, 1298 or 1300).

[0130] In certain embodiments, the disclosure describes RNAi oligonucleotides for reducing or inhibiting PNPLA3 expression that includes an antisense strand having a sequence as set forth in Table A, B, C, or D (e.g., SEQ ID NOs: 1179, 1181, 1183, 1185, 1187, 1189, 1191, 1193, 1195, 1197, 1199, 1201, 1203, 1205, 1207, 1209, 1211, 1213, 1215, 1217, 1219, 1221, 1223, 1225, 1227, 1229, 1231, 1233, 1235, 1237, 1239, 1241, 1243, 1245, 1247, 1249, 1251, 1253, 1255, 1257, 1259, 1261, 1263, 1265, 1267, 1269, 1271, 1273, 1275, 1277, 1279, 1281, 1283, 1285, 1287, 1289, 1291, 1293, 1295, 1297, 1299, or 1301).

[0131] In some embodiments, RNAi oligonucleotides are described for reducing or inhibiting PNPLA3 expression that include an antisense strand and a sense strand, where the antisense strand has a sequence as set forth in Table A, Table B, Table C, or Table D, and where the sense strand has a sequence as set forth in Table A, Table B, Table C, or Table D.

[0132] In some instances, the RNAi oligonucleotide includes a sense strand having a nucleotide sequence as set forth in Table A, Table B, Table C, or Table D, especially any one of SEQ ID NOs: 1178, 1180, 1182, 1184, 1186, 1188, 1190, 1192, 1194, 1196, 1198, 1200, 1202, 1204, 1206, 1208, 1210, 1212, 1214, 1216, 1218, 1220, 1222, 1224, 1226, 1228, 1230, 1232, 1234, 1236, 1238, 1240, 1242, 1244, 1246, 1248, 1250, 1252, 1254, 1256, 1258, 1260, 1262, 1264, 1266, 1268, 1270, 1272, 1274, 1276, 1278, 1280, 1282, 1284, 1286, 1288, 1290, 1292, 1294, 1296, 1298, or 1300. In some instances, the RNAi oligonucleotide includes an antisense strand having a nucleotide sequence as set for the in Table A, Table B, Table C, or Table D, especially any one of SEQ ID NOs: 1179, 1181, 1183, 1185, 1187, 1189, 1191, 1193, 1195, 1197, 1199, 1202, 1203, 1205, 1207, 1209, 1211, 1213, 1215, 1217, 1219, 1221, 1223, 1225, 1227, 1229, 1231, 1233, 1235, 1237, 1239, 1241, 1243, 1245, 1247, 1249, 1251, 1253, 1255, 1257, 1259, 1261, 1263, 1265, 1267, 1269, 1271, 1273, 1275, 1277, 1279, 1281, 1283, 1285, 1287, 1289, 1291, 1293, 1295, 1297, 1299, or 1301. In certain instances, the RNAi oligonucleotide includes a sense strand having a nucleotide sequence of any one of SEQ ID NOs: 1178, 1180, 1182, 1184, 1186, 1188, 1190, 1192, 1194, 1196, 1198, 1200, 1202, 1204, 1206, 1208, 1210, 1212, 1214, 1216, 1218, 1220, 1222, 1224, 1226, 1228, 1230, 1232, 1234, 1236, 1238, 1240, 1242, 1244, 1246, 1248, 1250, 1252, 1254, 1256, 1258, 1260, 1262, 1264, 1266, 1268, 1270, 1272, 1274, 1276, 1278, 1280, 1282, 1284, 1286, 1288, 1290, 1292, 1294, 1296, 1298, or 1300, and an antisense strand having a nucleotide sequence of any one of SEQ ID NOs: 1179, 1181, 1183, 1185, 1187, 1189, 1191, 1193, 1195, 1197, 1199, 1201, 1203, 1205, 1207, 1209, 1211, 1213, 1215, 1217, 1219, 1221, 1223, 1225, 1227, 1229, 1231, 1233, 1235, 1237, 1239, 1241, 1243, 1245, 1247, 1249, 1251, 1253, 1255, 1257, 1259, 1261, 1263, 1265, 1267, 1269, 1271, 1273, 1275, 1277, 1279, 1281, 1283, 1285, 1287, 1289, 1291, 1293, 1295, 1297, 1299, or 1301.

[0133] In certain instances, the RNAi oligonucleotide includes a sense strand having a nucleotide sequence of any one of SEQ ID NOs: 1188, 1190, 1200, 1216, 1218, 1220, 1224, 1230, 1232, 1234, 1244, 1246, 1250, 1254, 1262, 1288, 1290, 1292, 1294, 1296, 1298, or 1300, and an antisense strand having a nucleotide sequence of any one of SEQ ID NOs: 1189, 1191, 1201, 1215, 1217, 1221, 1225, 1231, 1233, 1235, 1245, 1247, 1251, 1255, 1263, 1289, 1291, 1295, 1297, 1299, or 1301.

[0134] In certain instances, the RNAi oligonucleotide includes a sense strand having a nucleotide sequence of any one of SEQ ID NOs: 1188, 1190, 1220, 1224, 1230, 1232, 1244, 1246, 1250, or 1254, and an antisense strand having a nucleotide sequence of any one of SEQ ID NOs: 1189, 1191, 1221, 1225, 1231, 1233, 1245, 1247, 1251, or 1255.

[0135] In certain instances, the sense strand and the antisense strand of the RNAi oligonucleotide, respectively, are selected from:
[0136] (a) SEQ ID NOs: 1220 and 1221,
[0137] (b) SEQ ID NOs: 1224 and 1225,
[0138] (c) SEQ ID NOs: 1230 and 1231,
[0139] (d) SEQ ID NOs: 1232 and 1233,
[0140] (e) SEQ ID NOs: 1188 and 1189,
[0141] (f) SEQ ID NOs: 1190 and 1191,
[0142] (g) SEQ ID NOs: 1244 and 1245,
[0143] (h) SEQ ID NOs: 1250 and 1251-,
[0144] (i) SEQ ID NOs: 1254 and 1255, and
[0145] (j) SEQ ID NOs: 1246 and 1247.

[0146] One of skill in the art appreciates that in some instances, the sequences presented in the Sequence Listing is referred to in describing the structure of an oligonucleotide (e.g., a ds oligonucleotide) or other nucleic acid. In such instances, the actual oligonucleotide or other nucleic acid has one or more alternative nucleotides (e.g., an RNA counterpart of a DNA nucleotide or a DNA counterpart of an RNA nucleotide) and/or one or more modified nucleotides and/or one or more modified internucleotide linkages and/or one or more other modification when compared with the specified sequence while retaining essentially same or similar complementary properties as the specified sequence.

[0147] In some embodiments, a ds oligonucleotide herein includes a 25-nucleotide sense strand and a 27-nucleotide antisense strand that when acted upon by a Dicer enzyme results in an antisense strand that is incorporated into the mature RISC. In certain instances, the sense strand of the ds oligonucleotide is longer than 27 nucleotides (e.g., 28, 29, 30, 31, 32, 33, 34, 35, 36, 37, 38, 39, or 40 nucleotides). In certain instances, the sense strand of the ds oligonucleotide is longer than 25 nucleotides (e.g., 26, 27, 28, 29, or 30 nucleotides).

[0148] In some instances, the ds oligonucleotides herein have one 5′ end that is thermodynamically less stable when compared to the other 5′ end. In some embodiments, the ds oligonucleotide is asymmetric and includes a blunt end at the 3′ end of a sense strand and a 3′-overhang at the 3′ end of an antisense strand. In some embodiments, the 3′-overhang on the antisense strand is about 1 to about 8 nucleotides in length (e.g., 1, 2, 3, 4, 5, 6, 7 or 8 nucleotides in length). Typically, a ds oligonucleotide for RNAi has a two-nucleotide overhang on the 3′ end of the antisense (guide) strand. However, other overhangs are possible. In some embodiments, an overhang is a 3′-overhang having a length of between about 1 to about 6 nucleotides, optionally 1 to 5, 1 to 4, 1 to 3, 1 to 2, 2 to 6, 2 to 5, 2 to 4, 2 to 3, 3 to 6, 3 to 5, 3 to 4, 4 to 6, 4 to 5, 5 to 6 nucleotides, or 1, 2, 3, 4, 5 or 6 nucleotides. However, in other instances, the overhang is a 5′-overhang comprising a length of between about 1 to about 6 nucleotides, optionally 1 to 5, 1 to 4, 1 to 3, 1 to 2, 2 to 6, 2 to 5, 2 to 4, 2 to 3, 3 to 6, 3 to 5, 3 to 4, 4 to 6, 4 to 5, 5 to 6 nucleotides, or 1, 2, 3, 4, 5 or 6 nucleotides.

[0149] In some instances, two terminal nucleotides on the 3′ end of an antisense strand are modified. In some instances, the two terminal nucleotides on the 3′ end of the antisense strand are complementary with the target mRNA (e.g., PNPLA3 mRNA). In other instances, the two terminal nucleotides on the 3′ end of the antisense strand are not complementary with the target mRNA. In some instances, two terminal nucleotides on each 3′ end of an oligonucleotide in the nicked tetraloop structure are GG. Typically, one or both of the two terminal GG nucleotides on each 3′ end of a ds oligonucleotide is not complementary with the target mRNA.

[0150] In some instances, there is one or more (e.g., 1, 2, 3, 4, or 5) mismatch(s) between the sense and antisense strand. If there is more than one mismatch between the sense and antisense strand, they may be positioned consecutively (e.g., 2, 3, or more in a row), or interspersed throughout the region of complementarity. In some instances, the 3′ end of the sense strand contains one or more mismatches. In certain instances, two mismatches are incorporated at the 3′ end of the sense strand. In some instances, base mismatches, or destabilization of segments at the 3′ end of the sense strand of the oligonucleotide improves or increases the potency of the ds oligonucleotide.

[0151] A. Antisense Strands: The oligonucleotides (e.g., a ds oligonucleotide) herein for targeting PNPLA3 mRNA and inhibiting PNPLA3 expression include an antisense strand including a sequence as set forth in the antisense strands of Table 1 or Table 3, or Table A, B, C or D. In some instances, the oligonucleotides include an antisense strand having at least about 12 (e.g., at least 12, at least 13, at least 14, at least 15, at least 16, at least 17, at least 18, at least 19, at least 20, at least 21, at least 22, or at least 23) contiguous nucleotides of a sequence as set forth in any one of SEQ ID NOs: 788, 844, 868, 872, 938, 1004, 1008, 1018, 1162, or 1164, or an antisense strand having a nucleotide sequence of any one of SEQ ID NOs: 1189, 1191, 1221, 1225, 1231, 1233, 1245, 1247, 1251, or 1255

[0152] Further, the oligonucleotides (e.g., a ds oligonucleotide) herein can include an antisense strand of up to about 40 nucleotides in length (e.g., up to 40, up to 35, up to 30, up to 27, up to 25, up to 21, up to 19, up to 17, or up to 12 nucleotides in length). In some instances, the oligonucleotides can have an antisense strand of at least about 12 nucleotides in length (e.g., at least 12, at least 15, at least 19, at least 21, at least 22, at least 25, at least 27, at least 30, at least 35, or at least 38 nucleotides in length). Alternatively, the oligonucleotides can have an antisense strand in a range of about 12 to about 40 (e.g., 12 to 40, 12 to 36, 12 to 32, 12 to 28, 15 to 40, 15 to 36, 15 to 32, 15 to 28, 17 to 22, 17 to 25, 19 to 27, 19 to 30, 20 to 40, 22 to 40, 25 to 40, or 32 to 40) nucleotides in length. In certain instances, the oligonucleotide can have an antisense strand of 12, 13, 14, 15, 16, 17, 18, 19, 20, 21, 22, 23, 24, 25, 26, 27, 28, 29, 30, 31, 32, 33, 34, 35, 36, 37, 38, 39, or 40 nucleotides in length.

[0153] As noted above, the antisense strand of the oligonucleotides herein may be referred to as the “guide strand.” For example, the antisense strand that engages with RISC and that binds to an Argonaute protein such as Ago2, or that engages with or that binds to one or more similar factors, and directs silencing of a target gene, the antisense strand is referred to as a guide strand (or “passenger strand”).

[0154] B. Sense Strands: The oligonucleotides (e.g., a ds oligonucleotide) herein for targeting PNPLA3 mRNA and inhibiting PNPLA3 expression include a sense strand sequence including a sequence as set forth in the sense strands of Table 1 or Table 3, or Table A, B, C, or D. In some instances, the oligonucleotides include a sense strand that having at least about 12 (e.g., at least 13, at least 14, at least 15, at least 16, at least 17, at least 18, at least 19, at least 20, at least 21, at least 22, or at least 23) contiguous nucleotides of a sequence as set forth in in any one of SEQ ID NOs: 787, 843, 867, 871, 937, 1003, 1007, 1017, 1161, or 1163.

[0155] Further, the oligonucleotides (e.g., ads oligonucleotide) herein include a sense strand (or passenger strand) of up to about 40 nucleotides in length (e.g., up to 40, up to 36, up to 30, up to 27, up to 25, up to 21, up to 19, up to 17, or up to 12 nucleotides in length). In some instances, the oligonucleotides can have a sense strand of at least about 12 nucleotides in length (e.g., at least 12, at least 15, at least 19, at least 21, at least 25, at least 27, at least 30, at least 36, or at least 38 nucleotides in length). Alternatively, the oligonucleotides can have a sense strand in a range of about 12 to about 40 (e.g., 12 to 40, 12 to 36, 12 to 32, 12 to 28, 15 to 40, 15 to 36, 15 to 32, 15 to 28, 17 to 21, 17 to 25, 19 to 27, 19 to 30, 20 to 40, 22 to 40, 25 to 40, or 32 to 40) nucleotides in length. In certain instances, the oligonucleotides can have a sense strand of 12, 13, 14, 15, 16, 17, 18, 19, 20, 21, 22, 23, 24, 25, 26, 27, 28, 29, 30, 31, 32, 33, 34, 35, 36, 37, 38, 39, or 40 nucleotides in length.

[0156] In some embodiments, the sense strand comprises a stem-loop structure at its 3′ end. In other embodiments, the sense strand comprises a stem-loop structure at its 5′ end. In additional embodiments, the stem is a duplex of about 2, 3, 4, 5, 6, 7, 8, 9, 10, 11, 12, 13, or 14 bp in length. In some embodiments, the stem-loop provides the oligonucleotides protection against degradation (e.g., enzymatic degradation) and facilitates or improves targeting and/or delivery to a target cell, tissue, or organ (e.g., the liver), or both. For example, the loop of the stem-loop provides nucleotides having one or more modifications that facilitate, improve, or increase targeting to a target mRNA (e.g., a PNPLA3 mRNA), inhibiting of target gene expression (e.g., PNPLA3 expression), and/or delivering to a target cell, tissue, or organ (e.g., the liver), or both. In some embodiments, the stem-loop itself or modification(s) to the stem-loop do not substantially affect the inherent gene expression inhibition activity of the oligonucleotide, but facilitates, improves, or increases stability (e.g., provides protection against degradation) and/or delivery of the oligonucleotide to a target cell, tissue, or organ (e.g., the liver). In certain embodiments, the oligonucleotides comprise a sense strand including (e.g., at its 3′ end) a stem-loop set forth as: S1-L-S2, in which S1 is complementary to S2, and in which L forms a single-stranded loop between S1 and S2 of up to about 10 nucleotides in length (e.g., 3, 4, 5, 6, 7, 8, 9, or 10 nucleotides in length). In certain embodiments, the loop (L) is 4 nucleotides in length. FIGS. 1 and 2 depict non-limiting examples of such an oligonucleotide. In some embodiments the loop (L) of the stem-loop having the structure S1-L-S2 as described above is a tetraloop (e.g., within a nicked tetraloop structure). In some embodiments, the tetraloop comprises ribonucleotides, deoxyribonucleotides, modified nucleotides, delivery ligands and combinations thereof.

### V. Oligonucleotide Modifications

[0157] A. Sugar Modifications: A modified sugar (also referred to herein as a sugar analog) includes a modified deoxyribose or ribose moiety in which, for example, one or more modifications occur at the 2′, 3′, 4′ and/or 5′ carbon position of the sugar. A modified sugar also includes non-natural, alternative, carbon structures such as those present in locked nucleic acids (“LNA”; see, e.g., Koshkin et al. (1998) TETRAHEDRON 54:3607-3630), unlocked nucleic acids (“UNA”; see, e.g., Snead et al. (2013) MOL. THER-NUC. ACIDS 2:e103) and bridged nucleic acids (“BNA”; see, e.g., Imanishi & Obika (2002) CHEM. COMMUN. 16:1653-1659).

[0158] In some embodiments, the nucleotide modification in the sugar is a 2′-modification such as, for example, 2′-O-propargyl, 2′-O-propylamin, 2′-amino, 2′-ethyl, 2′-fluoro (2′-F), 2′-aminoethyl (EA), 2′-O-methyl (2′-OMe), 2′-O-methoxyethyl (2′-MOE), 2′-O-[2-(methylamino)-2-oxoethyl] (2′-O-NMA), or 2′-deoxy-2′-fluoro-β-d-arabinonucleic acid (2′-FANA). In certain embodiments, the modification is 2′-F, 2′-OMe, or 2′-MOE. In other embodiments, the modification in the sugar is a modification of the sugar ring, which includes modification of one or more carbons of the sugar ring. For example, the modification in the sugar is a 2′-oxygen of the sugar linked to a 1′-carbon or 4′-carbon of the sugar, or a 2′-oxygen linked to the 1′-carbon or 4′-carbon via an ethylene or methylene bridge. In other embodiments, the modification is an acyclic sugar that lacks a 2′-carbon to 3′-carbon bond. In other embodiments, the modification is a thiol group such as, for example, in the 4′ position of the sugar.

[0159] The oligonucleotides herein include at least 1 modified nucleotide (e.g., at least 1, at least 5, at least 10, at least 15, at least 20, at least 25, at least 30, at least 35, at least 40, at least 45, at least 50, at least 55, at least 60, or more). In some embodiments, the sense strand comprises at least 1 modified nucleotide (e.g., at least 1, at least 5, at least 10, at least 15, at least 20, at least 25, at least 30, at least 35, or more). In some embodiments, the antisense strand comprises at least 1 modified nucleotide (e.g., at least 1, at least 5, at least 10, at least 15, at least 20, or more).

[0160] In certain embodiments, all nucleotides of the sense strand are modified. Likewise, all nucleotides of the antisense strand are modified. In some embodiments, all the nucleotides of the oligonucleotides herein (i.e., both the sense strand and the antisense strand) are modified. As above, and in some embodiments, the modified nucleotide is a 2′-modification (e.g., a 2′-F, 2′-OMe, 2′-MOE, and/or 2′-deoxy-2′-fluoro-β-d-arabinonucleic acid). In certain embodiments, the modified nucleotide is a 2′-modification such as, for example, a 2′-F or a 2′-OMe.

[0161] Moreover, the oligonucleotides herein have different modification patterns. In some embodiments, the modified oligonucleotides comprise an antisense strand having a modification pattern as set forth in any one of Tables A, B, C or D and comprise a sense strand sequence having a modification pattern as set forth in any one of Tables A, B, C or D (as well as FIG. 1). In some embodiments, one or more of positions 8, 9, 10, or 11 of the sense strand are modified with a 2′-F. In other embodiments, the sugar moiety at each nucleotide at positions 1 to 7 and 12 to 20 in the sense strand is modified with a 2′-OMe.

[0162] In some embodiments, the antisense strand includes 3 nucleotides that are modified at the 2′-position of the sugar moiety with a 2′-F. In some embodiments, the sugar moiety at positions 2, 5, and 14 and optionally up to 3 of the nucleotides at positions 1, 3, 7, and 10 of the antisense strand are modified with a 2′-F. In other embodiments, the sugar moiety at positions 2, 5, and 14 of the antisense strand is modified with a 2′-F. In other embodiments, the sugar moiety at positions 1, 2, 5, and 14 of the antisense strand is modified with a 2′-F. In still other instances, the sugar moiety at positions 1, 2, 3, 5, 7, and 14 of the antisense strand is modified with a 2′-F. In yet other embodiments, the sugar moiety at positions 1, 2, 3, 5, 10, and 14 of the antisense strand is modified with a 2′-F. In yet other embodiments, the sugar moiety at positions 2, 3, 5, 7, 10, and 14 of the antisense strand is modified with a 2′-F.

[0163] B. 5′-Terminal Phosphates: 5′-terminal phosphate groups can be used to enhance the interaction of the oligonucleotides herein with Ago2. However, oligonucleotides having a 5′-phosphate group may be susceptible to degradation via phosphatases or other enzymes, which can limit their bioavailability in vivo. In some embodiments, the oligonucleotides (e.g., a ds oligonucleotide) comprise analogs of 5′ phosphates that are resistant to such degradation. Examples of such phosphate analogs include, but are not limited to, oxymethylphosphonate, vinylphosphonate, malonyl phosphonate, or a combination thereof. In certain embodiments the 3′ end of a strand of the oligonucleotides is attached to a chemical moiety that mimics the electrostatic and steric properties of a natural 5′-phosphate group (“phosphate mimic”).

[0164] Alternatively, or additionally, the oligonucleotides herein have a phosphate analog at a 4′-carbon position of the sugar (referred to as a “4′-phosphate analog”). See, e.g., Intl. Patent Application Publication No. WO 2018/045317. In some embodiments, the oligonucleotides herein include a 4′-phosphate analog at a 5′-terminal nucleotide. In some embodiments, the phosphate analog is an oxymethylphosphonate, in which the oxygen atom of the oxymethyl group is bound to the sugar moiety (e.g., at its 4′-carbon) or analog thereof. In other embodiments, the 4′-phosphate analog is a thiomethylphosphonate or an aminomethylphosphonate, in which the sulfur atom of the thiomethyl group or the nitrogen atom of the amino methyl group is bound to the 4′-carbon of the sugar moiety or analog thereof. In certain embodiments, the 4′-phosphate analog is an oxymethylphosphonate, which is represented by the formula —O—CH₂—PO(OH)₂ or —O—CH₂—PO(OR)₂, in which R is independently selected from H, CH₃, an alkyl group, CH₂CH₂CN, CH₂OCOC(CH₃)₃, CH₂OCH₂CH₂Si (CH₃)₃, or a protecting group. In certain embodiments, the alkyl group is CH₂CH₃. In certain other embodiments, R is independently selected from H, CH₃, or CH₂CH₃.

[0165] C. Modified Internucleoside Linkages: In addition to the above modifications, the oligonucleotides herein comprise a modified internucleoside linkage. In some instances, phosphate modifications or substitutions result in oligonucleotides that comprise at least about 1 (e.g., at least 1, at least 2, at least 3, or at least 5) modified internucleotide linkages. In some embodiments, the oligonucleotides comprise about 1 to about 10 (e.g., 1 to 10, 2 to 8, 4 to 6, 3 to 10, 5 to 10, 1 to 5, 1 to 3, or 1 to 2) modified internucleotide linkages. In certain additional embodiments, the oligonucleotides comprise 1, 2, 3, 4, 5, 6, 7, 8, 9, or 10 modified internucleotide linkages.

[0166] Examples of modified internucleotide linkages include, but are not limited, to, a phosphorodithioate linkage, a phosphorothioate linkage, a phosphotriester linkage, a thionoalkylphosphonate linkage, a thionalkylphosphotriester linkage, a phosphoramidite linkage, a phosphonate linkage, or a boranophosphate linkage. In some embodiments, at least one modified internucleotide linkage of any one of the oligonucleotides as disclosed herein is a phosphorothioate linkage.

[0167] In some embodiments, the oligonucleotides herein comprise a phosphorothioate linkage between one or more of positions 1 and 2 of the sense strand, positions 1 and 2 of the antisense strand, positions 2 and 3 of the antisense strand, positions 3 and 4 of the antisense strand, positions 20 and 21 of the antisense strand, and positions 21 and 22 of the antisense strand. In other embodiments, the oligonucleotides comprise a phosphorothioate linkage between each of positions 1 and 2 of the sense strand, positions 1 and 2 of the antisense strand, positions 2 and 3 of the antisense strand, positions 20 and 21 of the antisense strand, and positions 21 and 22 of the antisense strand.

[0168] D. Base Modifications: In addition to the above modifications, the oligonucleotides herein also comprise one or more modified nucleobases. In some embodiments, modified nucleobases (also referred to herein as base analogs) are linked at the 1′ position of a nucleotide sugar moiety. In certain embodiments, the modified nucleobase is a nitrogenous base. In certain other embodiments, the modified nucleobase does not contain nitrogen atom. See, e.g., US Patent Application Publication No. 2008/0274462. In some embodiments, the modified nucleotide is a universal base. However, in certain embodiments, the modified nucleotide does not contain a nucleobase (abasic).

[0169] With regard to universal bases, they comprise a heterocyclic moiety located at the 1′ position of a nucleotide sugar moiety in a modified nucleotide, or the equivalent position in a nucleotide sugar moiety substitution, that, when present in a duplex, is positioned opposite more than one type of base without substantially altering structure of the duplex. Moreover, and compared to a reference ss nucleic acid (e.g., oligonucleotide) that is fully complementary to a target nucleic acid, a ss nucleic acid having a universal base forms a duplex with the target nucleic acid that has a lower Tₘ than a duplex formed with the complementary nucleic acid. However, when compared to a reference ss nucleic acid in which the universal base has been replaced with a base to generate a single mismatch, the ss nucleic acid having the universal base forms a duplex with the target nucleic acid that has a higher Tₘ than a duplex formed with the nucleic acid having the mismatched base.

[0170] Exemplary universal-binding nucleotides include, but are not limited to, inosine, 1-β-D-ribofuranosyl-5-nitroindole and/or 1-β-D-ribofuranosyl-3-nitropyrrole (see, e.g., US Patent Application Publication No. 2007/0254362; Van Aerschot et al. (1995) NUCLEIC ACIDS RES. 23:4363-70; Loakes et al. (1995) NUCLEIC ACIDS RES. 23:2361-66; and Loakes & Brown (1994) NUCLEIC ACIDS RES. 22:4039-43).

[0171] E. Reversible Modifications: While certain modifications to protect the oligonucleotides herein from the in vivo environment before reaching target cells can be made, they also can reduce the potency or activity of the oligonucleotides once they reach the cytosol of the target cell. Reversible modifications therefore can be made such that the molecule retains desirable properties outside of the cell, which are then removed upon entering the cytosolic environment of the cell. Reversible modification can be removed, for example, by the action of an intracellular enzyme or by the chemical conditions inside of a cell (e.g., through reduction by intracellular glutathione).

[0172] In some embodiments, a reversibly modified nucleotide comprises a glutathione-sensitive moiety. Typically, nucleic acid molecules are chemically modified with cyclic disulfide moieties to mask the negative charge created by the internucleotide diphosphate linkages and to improve cellular uptake and nuclease resistance. See, US Patent Application Publication No. 2011/0294869, Intl. Patent Application Publication Nos. WO 2014/088920 and WO 2015/188197, and Meade et al. (2014) NAT. BIOTECHNOL. 32:1256-63. This reversible modification of the internucleotide diphosphate linkages is designed to be cleaved intracellularly by the reducing environment of the cytosol (e.g., glutathione). Earlier examples include neutralizing phosphotriester modifications that are reported to be cleavable inside cells (see, e.g., Dellinger et al. (2003) J. AM. CHEM. SOC. 125:940-50).

[0173] Some reversible modifications protect the oligonucleotides during in vivo administration (e.g., transit through the blood and/or lysosomal/endosomal compartments of a cell) where the oligonucleotides will be exposed to nucleases and other harsh environmental conditions (e.g., pH). When released into the cytosol of a cell where the levels of glutathione are higher compared to extracellular space, the modification is reversed, and the result is cleaved oligonucleotides. Using reversible, glutathione-sensitive moieties, it is possible to introduce sterically larger chemical groups into the oligonucleotides when compared to the options available using irreversible chemical modifications. This is because these larger chemical groups will be removed in the cytosol and, therefore, should not interfere with the biological activity of the oligonucleotides inside the cytosol of a cell. As a result, these larger chemical groups can be engineered to confer various advantages to the oligonucleotides, such as nuclease resistance, lipophilicity, charge, thermal stability, specificity, and reduced immunogenicity. In some instances, the structure of the glutathione-sensitive moiety can be engineered to modify the kinetics of its release.

[0174] In some embodiments, the glutathione-sensitive moiety is attached to the sugar of the nucleotide. In certain embodiments, the glutathione-sensitive moiety is attached to the 2′-carbon of the sugar of a modified nucleotide. Additionally, or alternatively, the glutathione-sensitive moiety is attached to the 5′-carbon of a sugar, particularly when the modified nucleotide is the 5′-terminal nucleotide of the oligonucleotides. Additionally, or alternatively, the glutathione-sensitive moiety is attached to the 3′-carbon of sugar, particularly when the modified nucleotide is the 3′-terminal nucleotide of the oligonucleotides. In some embodiments, the glutathione-sensitive moiety includes a sulfonyl group (see, e.g., Intl. Patent Application Publication No. WO 2018/039364).

### VI. Targeting Ligands

[0175] It is desirable to target the oligonucleotides herein to one or more cells or one or more organs. Such a strategy can help to avoid undesirable effects in other organs or to avoid undue loss of the oligonucleotides to cells, tissue or organs that would not benefit therefrom. Accordingly, the oligonucleotides can be modified to facilitate targeting and/or delivering to a tissue, cell, or organ (e.g., to facilitate delivering the oligonucleotides to the liver). In some embodiments, the oligonucleotides are modified to facilitate delivery of the oligonucleotide to the hepatocytes of the liver. In certain embodiments, the oligonucleotides comprise at least one nucleotide (e.g., 1, 2, 3, 4, 5, 6, or more nucleotides) conjugated to one or more targeting ligand(s).

[0176] Exemplary targeting ligands include, but are not limited to, a carbohydrate, amino sugar, cholesterol, peptide, polypeptide, protein, or part of a protein (e.g., an antibody or antibody fragment), or lipid. In some embodiments, the targeting ligand is an aptamer. For example, the targeting ligand is an RGD peptide for targeting tumor vasculature or glioma cells, CREKA peptide for targeting tumor vasculature or stoma, transferrin, lactoferrin or an aptamer for targeting transferrin receptors expressed on CNS vasculature, or an anti-EGFR antibody for targeting EGFR on glioma cells. In certain embodiments, the targeting ligand is one or more GalNAc moieties.

[0177] In some embodiments, 1 or more (e.g., 1, 2, 3, 4, 5, or 6) nucleotides of the oligonucleotides each can be conjugated to a separate targeting ligand. In some embodiments, 2 to 4 nucleotides of the oligonucleotides each are conjugated to a separate targeting ligand. In some embodiments, targeting ligands can be conjugated to 2 to 4 nucleotides at either ends of the sense strand or antisense strand (e.g., targeting ligands are conjugated to a 2 to 4 nucleotide overhang or extension on the 5′ or 3′ end of the sense strand or antisense strand) such that the targeting ligands resemble bristles of a toothbrush and the oligonucleotides resemble a toothbrush. For example, the oligonucleotides comprise a stem-loop at either the 5′ or 3′ end of the sense strand and 1, 2, 3, or 4 nucleotides of the loop of the stem may be individually conjugated to a targeting ligand. In some embodiments, the oligonucleotides (e.g., a ds oligonucleotide) comprise a stem-loop at the 3′ end of the sense strand, where the loop of the stem-loop includes a triloop or a tetraloop, and where the 3 or 4 nucleotides of the triloop or tetraloop, respectfully, are individually conjugated to a targeting ligand.

[0178] GalNAc is a high affinity ligand for the ASGPR, which is primarily expressed on the sinusoidal surface of hepatocyte cells and has a major role in binding, internalizing and subsequent clearing circulating glycoproteins that contain terminal galactose or GalNAc residues (asialoglycoproteins). Conjugation (either indirect or direct) of GalNAc moieties to the oligonucleotides herein are used to target them to the ASGPR expressed on cells. In some embodiments, the oligonucleotides are conjugated to at least one or more GalNAc moieties, where the GalNAc moieties target the oligonucleotides to an ASGPR expressed on human liver cells (e.g., human hepatocytes).

[0179] The oligonucleotides herein are conjugated directly or indirectly to a monovalent GalNAc. In some embodiments, the oligonucleotides are conjugated directly or indirectly to more than one monovalent GalNAc (i.e., is conjugated to 2, 3, or 4 monovalent GalNAc moieties, and is typically conjugated to 3 or 4 monovalent GalNAc moieties). In some embodiments, the oligonucleotides are conjugated to one or more bivalent GalNAc, trivalent GalNAc or tetravalent GalNAc moieties.

[0180] In some embodiments, 1 or more (e.g., 1, 2, 3, 4, 5, or 6) nucleotides of the oligonucleotides herein each can be conjugated to a GalNAc moiety. In some embodiments, 2 to 4 nucleotides of a tetraloop each are conjugated to a separate GalNAc. In other embodiments, 1 to 3 nucleotides of a triloop each are conjugated to a separate GalNAc. In some embodiments, the targeting ligands are conjugated to 2 to 4 nucleotides at either end of the sense or antisense strand (e.g., ligands are conjugated to a 2 to 4 nucleotide overhang or extension on the 5′ or 3′ end of the sense or antisense strand) such that the GalNAc moieties resemble bristles of a toothbrush and the oligonucleotides resemble a toothbrush. In some embodiments, the GalNAc moieties are conjugated to a nucleotide of the sense strand. For example, 4 GalNAc moieties are conjugated to nucleotides in the tetraloop of the sense strand, where each GalNAc moiety is conjugated to 1 nucleotide. In certain embodiments, 3 GalNAc moieties are conjugated to nucleotides in the tetraloop of the sense strand, where each GalNAc moiety is conjugated to 1 nucleotide.

[0181] In certain embodiments, the oligonucleotides comprise a monovalent GalNAc attached to a guanine nucleotide referred to as [ademG-GalNAc] or 2′-aminodiethoxymethanol-Guanine-GalNAc, as depicted below:

[chemical structure]

[0182] In certain embodiments, the oligonucleotides herein comprise a monovalent GalNAc attached to an adenine nucleotide, referred to as [ademA-GalNAc] or 2′-aminodiethoxymethanol-Adenine-GalNAc, as depicted below:

[chemical structure]

[0183] An example of such conjugation is shown below for a loop having from 5′ to 3′, the nucleotide sequence GAAA (L=linker, X=heteroatom), where stem attachment points are shown. Such a loop is present, for example, at positions 27-30 of the sense strand listed in Table 3, A, B, C or D and as shown in FIG. 1. In the chemical formula, [symbol] is used to describe an attachment point to the oligonucleotide strand:

[chemical structure]

[0184] Appropriate methods or chemistry (e.g., click chemistry) are used to link a targeting ligand to a nucleotide. One way of conjugating the targeting ligand to a nucleotide is by using a click linker. In some embodiments, an acetal-based linker is used to conjugate the targeting ligand to a nucleotide of any one of the oligonucleotides herein. Acetal-based linkers are disclosed, for example, in Intl. Patent Application Publication No. WO 2016/100401. In some instances, the linker is a labile linker. However, in other instances, the linker is stable. An example is shown below for a loop having from 5′ to 3′, the nucleotides GAAA, in which GalNAc moieties are attached to nucleotides of the loop using an acetal linker. Such a loop is present, for example, at positions 27-30 of the any one of the sense strands listed in Table 3, A, B, C or D. In the chemical formula, [symbol] is an attachment point to the oligonucleotide strand:

[chemical structure]

[0185] In some embodiments, a duplex extension (e.g., of up to 3, 4, 5, or 6 bp in length) is provided between the targeting ligand (e.g., a GalNAc moiety) and the oligonucleotides herein (e.g., a ds oligonucleotide). In other embodiments, the oligonucleotides do not have a GalNAc conjugated thereto.

### Formulations and Pharmaceutical Compositions

[0186] The oligonucleotides herein are incorporated into a formulation or pharmaceutical composition. Various formulations have been developed to facilitate oligonucleotide use. For example, oligonucleotides can be delivered to a subject or a cellular environment using a formulation that minimizes degradation, facilitates delivery and/or uptake, or provides another beneficial property to the oligonucleotides in the formulation. In some embodiments, the oligonucleotides herein are formulated in buffer solutions such as phosphate buffered saline solutions, liposomes, micellar structures, and capsids.

[0187] Formulations of oligonucleotides with cationic lipids are used to facilitate transfection of the oligonucleotides into cells. For example, cationic lipids, such as lipofectin, cationic glycerol derivatives, and polycationic molecules (e.g., polylysine) can be used. Suitable lipids include Oligofectamine, Lipofectamine (Life Technologies), NC388 (Ribozyme Pharmaceuticals, Inc.), or FuGene 6 (Roche), all of which are used according to the manufacturer's instructions.

[0188] Accordingly, in some embodiments, the formulations herein comprise a liposome, a lipid, a lipid complex, a microsphere, a microparticle, a nanosphere, or a nanoparticle (such as a lipid nanoparticle) or may be otherwise formulated for administration to the cells, tissues, organs, or body of an individual in need thereof (see, e.g., Remington, “The Science and Practice of Pharmacy” (L. V. Allen Jr., ed., 22^{nd} Edition, Pharmaceutical Press, 2013).

[0189] In some embodiments, the formulations herein further comprise an excipient, which can confer to a composition improved stability, improved absorption, improved solubility and/or therapeutic enhancement of the active ingredient. In some embodiments, the excipient is a buffering agent (e.g., sodium citrate, sodium phosphate, a tris base, or sodium hydroxide) or a vehicle (e.g., a buffered solution, petrolatum, dimethyl sulfoxide, or mineral oil). In some embodiments, the oligonucleotides herein are lyophilized for extending shelf-life and then made into a solution before use (e.g., administration to an individual). Accordingly, the excipient in a pharmaceutical composition including one or more of the oligonucleotides is a lyoprotectant (e.g., mannitol, lactose, polyethylene glycol, or polyvinylpyrrolidone) or a collapse temperature modifier (e.g., dextran, Ficoll™, or gelatin).

[0190] Pharmaceutical compositions are formulated to be compatible with its intended route of administration. Routes of administration include, but are not limited to, parenteral (e.g., intravenous, intramuscular, intraperitoneal, intradermal, and subcutaneous), oral (e.g., inhalation), transdermal (e.g., topical), transmucosal, and rectal administration.

[0191] Pharmaceutical compositions suitable for injectable use comprise sterile aqueous solutions (where water soluble) or dispersions and sterile powders for the extemporaneous preparation of sterile injectable solutions or dispersion. For intravenous administration, suitable carriers include, but are not limited to, physiological saline, bacteriostatic water, Cremophor EL™ (BASF) or phosphate buffered saline (PBS). The carrier is a solvent or dispersion medium containing, for example, water, ethanol, polyol (e.g., glycerol, propylene glycol, liquid polyethylene glycol, and the like), as well as suitable mixtures thereof. In many embodiments, it will be preferable to comprise in the compositions with isotonic agents such as, for example, sugars, polyalcohols such as mannitol, sorbitol and/or sodium chloride. Sterile injectable solutions are prepared by incorporating the oligonucleotides herein in a required amount in a selected solvent with one or a combination of ingredients enumerated above, as required, followed by filtered sterilization.

[0192] Moreover, the pharmaceutical compositions comprise at least about 0.1% of a therapeutic agent (e.g., one or more of the oligonucleotides herein) or more, although the percentage of the therapeutic agent may be between about 1% to about 80% or more of the weight or volume of the total composition. Factors such as solubility, bioavailability, biological half-life, route of administration, product shelf life, as well as other pharmacological considerations will be contemplated by one of skill in the art of preparing such pharmaceutical formulations, and as such, a variety of dosages and treatment regimens may be desirable.

[0193] Even though several examples are directed toward liver-targeted delivery of at least one of the oligonucleotides herein, targeting of other tissues also is contemplated.

### Kits

[0194] The oligonucleotides herein can be incorporated into a kit comprising one or more of the oligonucleotides herein, and instructions for use. In some embodiments, the kit comprises one or more of the oligonucleotides, and a package insert containing instructions for use of the kit and/or any component thereof. In other embodiments, the kit comprises a suitable container, one or more of the oligonucleotides, one or more controls, and various buffers, reagents, enzymes, and other standard ingredients as are known in the art.

[0195] In some embodiments, the container can be at least one vial, well, test tube, flask, bottle, syringe, or other container means, into which the one or more oligonucleotides are placed, and in some instances, suitably aliquoted. In other embodiments, where an additional component is provided, the kit contains additional containers into which this component is placed. The kits also comprise a means for containing the one or more oligonucleotides and any other reagent in close confinement for commercial sale. Such containers include injection or blow-molded plastic containers into which the desired vials are retained. Containers and/or kits comprise labeling with instructions for use and/or warnings.

[0196] In some embodiments, the kit comprises one or more oligonucleotides herein, and a pharmaceutically acceptable carrier, or a pharmaceutical composition comprising one or more of the oligonucleotides and instructions for treating or delaying progression of a disease, disorder, or condition associated with PNPLA3 expression in an individual in need thereof.

### METHODS

### Methods of Making

[0197] The oligonucleotides herein are made using methods and/or techniques known to one of skill in the art such as, for example, by using conventional nucleic acid solid phase synthesis. The polynucleotides of the oligonucleotides are assembled on a suitable nucleic acid synthesizer utilizing standard nucleotide or nucleoside precursors (e.g., phosphoramidites). Automated nucleic acid synthesizers, including DNA/RNA synthesizers, are commercially available from, for example, Applied Biosystems (Foster City, CA), BioAutomation (Irving, TX), and GE Healthcare Life Sciences (Pittsburgh, PA).

[0198] As one of skill in the art understands, other methods and/or techniques of synthesizing the oligonucleotides herein are used. Additionally, the various synthetic steps are performed in an alternate sequence or order to give the desired compounds. Other synthetic chemistry transformations, protecting groups (e.g., for hydroxyl, amino, etc. present on the bases), and protecting group methodologies (protection and deprotection) useful in synthesizing the oligonucleotides are known in the art and are described in, for example, Larock, “Comprehensive Organic Transformations,” VCH Publishers (1989); Greene & Wuts, PROTECTIVE GROUPS IN ORGANIC SYNTHESIS, 2^{nd} Ed., John Wiley & Sons (1991); Fieser & Fieser, Fieser and Fieser's Reagents for Organic Synthesis, John Wiley & Sons (1994); and Paquette, ed., ENCYCLOPEDIA OF REAGENTS FOR ORGANIC SYNTHESIS, John Wiley & Sons (1995).

### Methods of Using

### I. Methods of Reducing PNPLA3 Expression in Cells, Tissue, Organs, and Organisms

[0199] The oligonucleotides herein are used to reduce PNPLA3 mRNA in cells, tissues, organs, or individuals. The methods comprise the steps described herein, and these may be, but not necessarily, carried out in the sequence as described. Other sequences, however, also are conceivable. Moreover, individual, or multiple steps are carried out either in parallel and/or overlapping in time and/or individually or in multiply repeated steps. Furthermore, the methods comprise additional, unspecified steps.

[0200] The methods comprise contacting or delivering to a cell, population of cells, tissues, organs, or individuals an effective amount any of the oligonucleotides herein (e.g., a ds oligonucleotide) for reducing PNPLA3 expression. In some embodiments, reduced PNPLA3 expression is determined by measuring a reduction in the amount or level of PNPLA3 mRNA, PNPLA3 protein, or PNPLA3 activity in a cell.

[0201] With regard to an appropriate cell type, the cell type is any cell that expresses mRNA (e.g., hepatocytes, macrophages, monocyte-derived cells, prostate cancer cells, cells of the brain, endocrine tissue, bone marrow, lymph nodes, lung, gall bladder, liver, duodenum, small intestine, pancreas, kidney, gastrointestinal tract, bladder, adipose and soft tissue, and skin). In some embodiments, the cell is a primary cell obtained from an individual. In some embodiments, the primary cell has undergone a limited number of passages such that the cell substantially maintains is natural phenotypic properties. In some embodiments, the cell is an ex vivo, in vivo, or in vitro cell (i.e., such that one or more of the oligonucleotides herein can be delivered to the cell in culture or to an organism in which the cell resides).

[0202] In some embodiments, the oligonucleotides herein are delivered to a cell or population of cells using a nucleic acid delivery method known in the art including, but not limited to, injecting a solution containing the oligonucleotides, bombarding by particles covered by the oligonucleotides, exposing the cell or population of cells to a solution containing the oligonucleotides, or electroporating cell membranes in the presence of the oligonucleotides. Other methods known in the art for delivering oligonucleotides to cells are used such as, for example, lipid-mediated carrier transport, chemical-mediated transport, and cationic liposome transfection such as calcium phosphate, and others.

[0203] Reduced PNPLA3 expression is determined by an assay or technique that evaluates one or more molecules, properties or characteristics of a cell or population of cells associated with PNPLA3 expression (e.g., using a PNPLA3 expression biomarker) or by an assay or technique that evaluates molecules that are directly indicative of PNPLA3 expression in a cell or population of cells (e.g., PNPLA3 mRNA or PNPLA3 protein). In some embodiments, the extent to which the oligonucleotides reduce PNPLA3 expression are evaluated by comparing PNPLA3 expression in a cell or population of cells contacted with the oligonucleotides to a control cell or population of cells (e.g., a cell or population of cells not contacted with the oligonucleotides or contacted with a control oligonucleotide). In some embodiments, a control amount or level of PNPLA3 expression in a control cell or population of cells is predetermined, such that the control amount or level need not be measured in every instance the assay or technique is performed. The predetermined level or value takes a variety of forms including, but not limited to, a single cut-off value, such as a median or mean.

[0204] Contacting or delivering the oligonucleotides herein (e.g., a ds oligonucleotide) to a cell or a population of cells result in reduced PNPLA3 expression. In some embodiments, reduced PNPLA3 expression is relative to a control amount or level of PNPLA3 expression in the cell or the population of cells not contacted with the oligonucleotides or contacted with a control oligonucleotide. In some embodiments, reduced PNPLA3 expression is about 1% or lower, about 5% or lower, about 10% or lower, about 15% or lower, about 20% or lower, about 25% or lower, about 30% or lower, about 35% or lower, about 40% or lower, about 45% or lower, about 50% or lower, about 55% or lower, about 60% or lower, about 70% or lower, about 80% or lower, or about 90% or lower relative to a control amount or level of PNPLA3 expression. In some embodiments, the control amount or level of PNPLA3 expression is an amount or level of PNPLA3 mRNA and/or PNPLA3 protein in the cell or the population of cells that has not been contacted with oligonucleotides herein. In some embodiments, the effect of delivery of the oligonucleotides to the cell or the population of cells according to a method herein is assessed after any finite period or amount of time (e.g., minutes, hours, days, weeks, and/or months). For example, PNPLA3 expression is determined in the cell or the population of cells at least about 4 hours, about 8 hours, about 12 hours, about 18 hours, or about 24 hours. Alternatively, PNPLA3 expression is determined in the cell or the population of cells at least about 1 day, about 2 days, about 3 days, about 4 days, about 5 days, about 6 days, about 7 days, about 8 days, about 9 days, about 10 days, about 11 days, about 12 days, about 13 days, about 14 days, about 21 days, about 28 days, about 35 days, about 42 days, about 49 days, about 56 days, about 63 days, about 70 days, about 77 days, or about 84 days or more after contacting or delivering the oligonucleotides to the cell or population of cells. In other embodiments, PNPLA3 expression is determined in the cell or the population of cells at least about 1 month, about 2 months, about 3 months, about 4 months, about 5 months, or about 6 months or more after contacting or delivering the oligonucleotides to the cell or the population of cells.

[0205] In some embodiments, the oligonucleotides herein are delivered in the form of a transgene that is engineered to express in a cell one or more of the oligonucleotides or strands (e.g., sense and antisense strands). For example, the oligonucleotides are delivered using a transgene engineered to express any oligonucleotide herein. Transgenes may be delivered using viral vectors (e.g., adenovirus, retrovirus, vaccinia virus, poxvirus, adeno-associated virus, or herpes simplex virus) or non-viral vectors (e.g., plasmids or synthetic mRNAs). In some embodiments, the transgenes are injected directly to an individual.

### II. Methods of Treatment:

[0206] Methods for treating an individual having, suspected of having or at risk of developing, a disease, disorder, or condition associated with PNPLA3 expression comprise administering at least one or more of the oligonucleotides herein. Additionally, methods for treating or attenuating in an individual, an onset or progression of a disease, disorder, or condition associated with PNPLA3 expression comprise using one or more of the oligonucleotides herein. Furthermore, methods for achieving one or more therapeutic benefits in an individual having a disease, disorder, or condition associated with PNPLA3 expression comprise providing one or more of the oligonucleotides herein. In some embodiments, the individual can be treated by administering a therapeutically effective amount of any one or more of the oligonucleotides of any of the above disclosed embodiments. In some embodiments, the treatment comprises reducing PNPLA3 expression. In some embodiments, the individual is treated therapeutically. In some embodiments, the individual is treated prophylactically. In all of these embodiments, the oligonucleotide is selected from Table A, B, C or D.

[0207] In some embodiments, the one or more oligonucleotides, or a pharmaceutical composition including the same, is administered to the individual having a disease, disorder, or condition associated with PNPLA3 expression such that PNPLA3 expression is reduced in the individual, thereby treating the individual. In some embodiments, an amount or level of PNPLA3 mRNA is reduced in the individual. In other embodiments, an amount or level of PNPLA3 protein is reduced in the individual. In still other embodiments, an amount or level of PNPLA3 activity is reduced in the individual. In yet other embodiments, an amount or level of liver TG (e.g., one or more TG(s) or total TGs in liver) is reduced in the individual, especially in the liver. In still other instances, an amount or level of liver inflammation can be reduced. In still other instances, an amount of level of liver fibrosis is reduced. In still other embodiments, an amount or level of plasma AST, plasma ALT, or even Pro-C3 is reduced. In any of the above disclosed embodiments, the oligonucleotides comprise a sense strand having a nucleotide sequence of any one of SEQ ID NOs: 1188, 1190, 1220, 1224, 1230, 1232, 1244, 1246, 1250 or 1254, and an antisense strand having a nucleotide sequence of any one of SEQ ID NOs: 1189, 1191, 1221, 1225, 1231, 1233, 1245, 1247, 1251 or 1255.

[0208] In some embodiments, PNPLA3 expression is reduced in the individual by at least about 30%, about 35%, about 40%, about 45%, about 50%, about 55%, about 60%, about 65%, about 70%, about 75%, about 80%, about 85%, about 90%, about 95%, about 99%, or greater than 99% when compared to PNPLA3 expression prior to administering the one or more oligonucleotides or pharmaceutical composition thereof. In other embodiments, PNPLA3 expression is reduced in the individual by at least about 30%, about 35%, about 40%, about 45%, about 50%, about 55%, about 60%, about 65%, about 70%, about 75%, about 80%, about 85%, about 90%, about 95%, about 99%, or greater than 99% when compared to PNPLA3 expression in an individual (e.g., a reference or control subject) not receiving the one or more oligonucleotides or pharmaceutical composition or receiving a control oligonucleotide, pharmaceutical composition or treatment.

[0209] In certain embodiments, an amount or level of PNPLA3 mRNA is reduced in the individual by at least about 30%, about 35%, about 40%, about 45%, about 50%, about 55%, about 60%, about 65%, about 70%, about 75%, about 80%, about 85%, about 90%, about 95%, about 99%, or greater than 99% when compared to an amount or level of PNPLA3 mRNA prior to administering the one or more oligonucleotides or pharmaceutical composition thereof. In some embodiments, the amount or level of PNPLA3 mRNA is reduced in the individual by at least about 30%, about 35%, about 40%, about 45%, about 50%, about 55%, about 60%, about 65%, about 70%, about 75%, about 80%, about 85%, about 90%, about 95%, about 99%, or greater than 99% when compared to an amount or level of PNPLA3 mRNA in an individual (e.g., a reference or control subject) not administered the one or more oligonucleotides or pharmaceutical composition or administered a control oligonucleotide, pharmaceutical composition, or treatment.

[0210] In certain embodiments, an amount or level of PNPLA3 protein is reduced in the individual by at least about 30%, about 35%, about 40%, about 45%, about 50%, about 55%, about 60%, about 65%, about 70%, about 75%, about 80%, about 85%, about 90%, about 95%, about 99%, or greater than 99% when compared to an amount or level of PNPLA3 protein prior to administering the one or more oligonucleotides or pharmaceutical composition thereof. In other embodiments, an amount or level of PNPLA3 protein is reduced in the individual by at least about 30%, about 35%, about 40%, about 45%, about 50%, about 55%, about 60%, about 65%, about 70%, about 75%, about 80%, about 85%, about 90%, about 95%, about 99%, or greater than 99% when compared to an amount or level of PNPLA3 protein in an individual (e.g., a reference or control subject) not administered the one or more oligonucleotides or pharmaceutical composition or administered a control oligonucleotide, pharmaceutical composition or treatment.

[0211] In certain embodiments, an amount or level of PNPLA3 activity is reduced in the individual by at least about 30%, about 35%, about 40%, about 45%, about 50%, about 55%, about 60%, about 65%, about 70%, about 75%, about 80%, about 85%, about 90%, about 95%, about 99%, or greater than 99% when compared to an amount or level of PNPLA3 activity prior to administering the one or more oligonucleotides or pharmaceutical composition thereof. In some embodiments, the amount or level of PNPLA3 activity is reduced in the individual by at least about 30%, about 35%, about 40%, about 45%, about 50%, about 55%, about 60%, about 65%, about 70%, about 75%, about 80%, about 85%, about 90%, about 95%, about 99%, or greater than 99% when compared to an amount or level of PNPLA3 activity in an individual (e.g., a reference or control subject) not administered the one or more oligonucleotides or pharmaceutical composition or administered a control oligonucleotide, pharmaceutical composition or treatment.

[0212] In certain embodiments, an amount or level of TG, especially liver TG, can be reduced in the individual by at least about 30%, about 35%, about 40%, about 45%, about 50%, about 55%, about 60%, about 65%, about 70%, about 75%, about 80%, about 85%, about 90%, about 95%, about 99%, or greater than 99% when compared to an amount or level of TG prior to administering the one or more oligonucleotides or pharmaceutical composition thereof. In some embodiments, the amount or level of TG is reduced in the individual by at least about 30%, about 35%, about 40%, about 45%, about 50%, about 55%, about 60%, about 65%, about 70%, about 75%, about 80%, about 85%, about 90%, about 95%, about 99%, or greater than 99% when compared to an amount or level of TG in an individual (e.g., a reference or control subject) not administered the one or more oligonucleotides or pharmaceutical composition or administered a control oligonucleotide, pharmaceutical composition or treatment.

[0213] Here, PNPLA3 expression, the amount or level of PNPLA3 mRNA, PNPLA3 protein, PNPLA3 activity, liver TG, or any combination thereof, is reduced in a cell (e.g., a hepatocyte), a population or a group of cells (e.g., an organoid), a tissue (e.g., liver tissue), a sample (e.g., a liver biopsy sample), an organ (e.g., liver), blood or a fraction thereof (e.g., plasma), or any other biological material obtained or isolated from the individual. In some embodiments, PNPLA3 expression, the amount or level of PNPLA3 mRNA, PNPLA3 protein, PNPLA3 activity, TG, or any combination thereof, is reduced in more than one type of cell (e.g., a hepatocyte and one or more other type(s) of cell), more than one groups of cells, more than one type of tissue (e.g., liver tissue and one or more other type(s) of tissue), more than one type of sample (e.g., a liver biopsy sample and one or more other type(s) of biopsy sample), more than one organ (e.g., liver and one or more other organ(s)), more than one fraction of blood (e.g., plasma and one or more other blood fraction(s)) obtained or isolated from the subject.

[0214] Examples of a disease, disorder, or condition associated with PNPLA3 expression include, but are not limited to, AH, ALD, HCC, CCA, PSC, NAFLD, NASH, fatty liver (steatosis), inflammation of the liver, liver fibrosis, cirrhosis of the liver, or a combination thereof.

[0215] Because of their high specificity, the oligonucleotides herein specifically target mRNAs of target genes of cells, tissues, or organs (e.g., liver). In preventing disease, the target gene is the one that is required for initiation or maintenance of the disease or that has been identified as being associated with a higher risk of contracting the disease. In treating disease, one or more of the oligonucleotides are brought into contact with the cells, tissue or organ exhibiting or responsible for mediating the disease. For example, an oligonucleotide substantially identical to all or part of a wild-type (i.e., native) or mutated gene associated with a disorder or condition associated with PNPLA3 expression is brought into contact with or introduced into a cell or tissue type of interest such as a hepatocyte or other liver cell.

[0216] In some embodiments, the target gene is from any mammal, such as a human. Any gene may be silenced according to the methods herein. Moreover, the methods herein typically involve administering to an individual a therapeutically effective amount of one or more oligonucleotides herein, that is, an amount capable of producing a desirable therapeutic result. The therapeutically acceptable amount is an amount that therapeutically treats a disease or disorder or condition. The appropriate dosage for any one individual will depend on certain factors, including the individual's size, body surface area, age, the composition to be administered, the active ingredient(s) in the composition, time and route of administration, general health, and other therapeutic agents being administered concurrently.

[0217] In the methods, the individual is administered any one of the oligonucleotides or compositions herein either enterally (e.g., orally, by gastric feeding tube, by duodenal feeding tube, via gastrostomy, or rectally), parenterally (e.g., subcutaneous injection, intravenous injection or infusion, intra-arterial injection or infusion, intraosseous infusion, intramuscular injection, intracerebral injection, intracerebroventricular injection, or intrathecal), topically (e.g., epicutaneous, inhalational, via eye drops, or through a mucous membrane), or by direct injection into a target organ (e.g., the liver of a subject). Typically, the oligonucleotides or compositions are administered intravenously or subcutaneously.

[0218] As a non-limiting set of examples, the oligonucleotides or compositions herein typically are administered quarterly (once every three months), bi-monthly (once every two months), monthly or weekly. For example, the oligonucleotides or compositions are administered every week or at intervals of two, or three weeks. In certain embodiments, the oligonucleotides, or compositions are administered daily. In some embodiments, an individual is administered one or more loading doses of the oligonucleotides or compositions followed by one or more maintenance doses of the oligonucleotides or compositions.

[0219] In some embodiments, the individual is a human, a non-human primate, or other mammalian subject. In other embodiments, the individual is a domesticated animal such as a dog or a cats; livestock such as a horse, cattle, pig, sheep, goat, or chicken; and animals such as a mouse, rat, guinea pig or hamster.

### III. Medical Uses

[0220] The oligonucleotides herein can be used, or adapted for use, to treat an individual (e.g., a human having a disease, disorder, or condition associated with PNPLA3 expression) that would benefit from reducing PNPLA3 expression. In some embodiments, the oligonucleotides are provided for use, or adapted for use, to treat an individual having a disease, disorder, or condition associated with PNPLA3 expression. Also, the oligonucleotides are provided for use, or adaptable for use, in the manufacture of a medicament or pharmaceutical composition for treating a disease, disorder, or condition associated with PNPLA3 expression. In other embodiments, the oligonucleotides are provided for use, or adaptable for use, in targeting PNPLA3 mRNA and reducing PNPLA3 expression (e.g., via the RNAi pathway). In other embodiments, the oligonucleotides are provided for use, or adaptable for use, in targeting PNPLA3 mRNA and reducing an amount or level of PNPLA3 mRNA, PNPLA3 protein, and/or PNPLA3 activity.

[0221] In some embodiments, the methods comprise selecting an individual for treatment based upon the individual having a marker (e.g., a biomarker) for a disease, disorder, or condition associated with PNPLA3 expression, or someone predisposed to the same, such as, but not limited to, PNPLA3 mRNA, PNPLA3 protein or a combination thereof. Likewise, and as detailed below, the methods also comprise additional steps such as, for example, measuring or obtaining a baseline value for a marker of PNPLA3 expression (e.g., PNPLA3 protein) and then comparing such obtained value to one or more other baseline values or values obtained after the individual is administered one or more of the oligonucleotides to assess the effectiveness of treatment.

### EXAMPLES

[0222] The following non-limiting examples are offered for purposes of illustration, not limitation.

### Synthesis of Oligonucleotides

### Example 1: Preparing ds RNAi Oligonucleotides

[0223] Oligonucleotide synthesizing and purifying: The ds RNAi oligonucleotides in the Examples are chemically synthesized using methods described herein. Generally, ds RNAi oligonucleotides are synthesized using solid phase oligonucleotide synthesis methods as described for 19-23mer siRNAs (see, e.g., Scaringe et al. (1990) NUCLEIC ACIDS RES. 18:5433-41 and Usman et al. (1987) J. AM. CHEM. SOC. 109:7845-45; see also, U.S. Pat. Nos. 5,804,683; 5,831,071; 5,998,203; 6,008,400; 6,111,086; 6,117,657; 6,353,098; 6,362,323; 6,437,117 and 6,469,158).

[0224] Individual RNA strands are synthesized and HPLC purified according to standard methods (Integrated DNA Technologies). For example, RNA oligonucleotides are synthesized using solid phase phosphoramidite chemistry, deprotected, and desalted on NAP-5 columns (Amersham Pharmacia Biotech; Piscataway, NJ) using standard techniques (Damha & Olgivie (1993) METHODS MOL. BIOL. 20:81-114; Wincott et al. (1995) NUCLEIC ACIDS RES. 23:2677-84). The oligomers are purified using ion-exchange high performance liquid chromatography (IE-HPLC) on an Amersham Source 15Q column (1.0 cm×25 cm; Amersham Pharmacia Biotech) using a 15 min step-linear gradient. The gradient varies from 90:10 Buffers A:B to 52:48 Buffers A:B, where Buffer A is 100 mM Tris pH 8.5 and Buffer B is 100 mM Tris pH 8.5, 1 M NaCl. Samples are monitored at 260 nm and peaks corresponding to the full-length oligonucleotide species are collected, pooled, desalted on NAP-5 columns, and lyophilized.

[0225] The purity of each oligomer is determined by capillary electrophoresis (CE) on a Beckman PACE 5000 (Beckman Coulter, Inc.). The CE capillaries have a 100 μm inner diameter and contain ssDNA 100R Gel (Beckman-Coulter). Typically, about 0.6 nmole of oligonucleotide is injected into a capillary, is run in an electric field of 444 V/cm and is detected by UV absorbance at 260 nm. Denaturing Tris-Borate-7 M-urea running buffer is purchased from Beckman-Coulter. Oligoribonucleotides are obtained that are at least 90% pure as assessed by CE for use in experiments described below. Compound identity is verified by matrix-assisted laser desorption ionization time-of-flight (MALDI-TOF) mass spectroscopy on a Voyager DE™ Biospectometry Work Station (Applied Biosystems) following the manufacturer's recommended protocol. Relative molecular masses of all oligomers are obtained, often within 0.2% of expected molecular mass.

[0226] Preparing duplexes: ss RNA oligomers are resuspended (e.g., at 100 μM concentration) in duplex buffer having 100 mM potassium acetate, 30 mM HEPES, pH 7.5. Complementary sense and antisense strands are mixed in equal molar amounts to yield a final solution of, for example, 50 μM duplex. Samples are heated to 100° C. for 5 min in RNA buffer (IDT) and are allowed to cool to room temperature before use. The ds RNA oligonucleotides are stored at −20° C. ss RNA oligomers are stored lyophilized or in nuclease-free water at −80° C.

### In Vitro Function

### Example 2: RNAi Oligonucleotide Inhibition of PNPLA3 Expression In Vitro

[0227] PNPLA3 target sequence identifying: To identify RNAi oligonucleotide inhibitors of PNPLA3 expression, a computer-based algorithm is used to computationally generate PNPLA3 target sequences suitable for assaying PNPLA3 expression inhibition by the RNAi pathway. The algorithm provides RNAi oligonucleotide guide (antisense) strand sequences that are complementary to suitable PNPLA3 target sequences of human PNPLA3 mRNA (e.g., SEQ ID NO: 1). Some of the guide strand sequences identified by the algorithm also are complementary to the corresponding PNPLA3 target sequence of monkey PNPLA mRNA. Some of the antisense (guide) strand sequences identified by the algorithm also are complementary to the corresponding PNPLA3 target sequence of monkey PNPLA3 mRNA (e.g., SEQ ID NO:5). From this, 384 ds RNAi oligonucleotides (formatted as DsiRNA oligonucleotides) are generated, each with a unique antisense strand having a region of complementarity to a PNPLA3 target sequence identified by the algorithm.

TABLE 1
DsiRNAs (unmodified) Targeting Human PNPLA3 mRNA and Controls Evaluated in Cells.

| | Passenger | SEQ ID | Guide | SEQ ID |
|---|---|---|---|---|
| DsiRNA | (sense) | NO: | (antisense) | NO: |
| 1 | UCUGCAGGUCCUCUCAGAUCUUGUG | 9 | CACAAGAUCUGAGAGGACCUGCAGAGU | 10 |
| 2 | AGGUCCUCUCAGAUCUUGUGCGGAA | 11 | UUCCGCACAAGAUCUGAGAGGACCUGC | 12 |
| 3 | AUUGGCAUCUUCCAUCCAUCCUUCA | 13 | UGAAGGAUGGAUGGAAGAUGCCAAUGU | 14 |
| 4 | AUCUUCCAUCCAUCCUUCAACUUAA | 15 | UUAAGUUGAAGGAUGGAUGGAAGAUGC | 16 |
| 5 | UCUUCCAUCCAUCCUUCAACUUAAG | 17 | CUUAAGUUGAAGGAUGGAUGGAAGAUG | 18 |
| 6 | CCAGAGUGUCUGAUGGGGAAAACGU | 19 | ACGUUUUCCCCAUCAGACACUCUGGUA | 20 |
| 7 | GAGUGUCUGAUGGGGAAAACGUUCU | 21 | AGAACGUUUUCCCCAUCAGACACUCUG | 22 |
| 8 | AUGGGGAAAACGUUCUGGUGUCUGA | 23 | UCAGACACCAGAACGUUUUCCCCAUCA | 24 |
| 9 | GGGGAAAACGUUCUGGUGUCUGACU | 25 | AGUCAGACACCAGAACGUUUUCCCCAU | 26 |
| 10 | GGGAAAACGUUCUGGUGUCUGACUU | 27 | AAGUCAGACACCAGAACGUUUUCCCCA | 28 |
| 11 | GGAAAACGUUCUGGUGUCUGACUUU | 29 | AAAGUCAGACACCAGAACGUUUUCCCC | 30 |
| 12 | GAAAACGUUCUGGUGUCUGACUUUC | 31 | GAAAGUCAGACACCAGAACGUUUUCCC | 32 |
| 13 | AAAACGUUCUGGUGUCUGACUUUCG | 33 | CGAAAGUCAGACACCAGAACGUUUUCC | 34 |
| 14 | AAACGUUCUGGUGUCUGACUUUCGG | 35 | CCGAAAGUCAGACACCAGAACGUUUUC | 36 |
| 15 | AACGUUCUGGUGUCUGACUUUCGGU | 37 | ACCGAAAGUCAGACACCAGAACGUUUU | 38 |
| 16 | ACGUUCUGGUGUCUGACUUUCGGUC | 39 | GACCGAAAGUCAGACACCAGAACGUUU | 40 |
| 17 | GUUCUGGUGUCUGACUUUCGGUCCA | 41 | UGGACCGAAAGUCAGACACCAGAACGU | 42 |
| 18 | GACGAAGUCGUGGAUGCCUUGGUAU | 43 | AUACCAAGGCAUCCACGACUUCGUCUU | 44 |
| 19 | ACGAAGUCGUGGAUGCCUUGGUAUG | 45 | CAUACCAAGGCAUCCACGACUUCGUCU | 46 |
| 20 | CGAAGUCGUGGAUGCCUUGGUAUGU | 47 | ACAUACCAAGGCAUCCACGACUUCGUC | 48 |
| 21 | CAGAGGCGUGCGAUAUGUGGAUGGA | 49 | UCCAUCCACAUAUCGCACGCCUCUGAA | 50 |
| 22 | GCGAUAUGUGGAUGGAGGAGUGAGU | 51 | ACUCACUCCUCCAUCCACAUAUCGCAC | 52 |
| 23 | GAUGGAGGAGUGAGUGACAACGUAC | 53 | GUACGUUGUCACUCACUCCUCCAUCCA | 54 |
| 24 | GAGGAGUGAGUGACAACGUACCCUU | 55 | AAGGGUACGUUGUCACUCACUCCUCCA | 56 |
| 25 | GAGUGAGUGACAACGUACCCUUCAU | 57 | AUGAAGGGUACGUUGUCACUCACUCCU | 58 |
| 26 | AGUGAGUGACAACGUACCCUUCAUU | 59 | AAUGAAGGGUACGUUGUCACUCACUCC | 60 |
| 27 | GUGAGUGACAACGUACCCUUCAUUG | 61 | CAAUGAAGGGUACGUUGUCACUCACUC | 62 |
| 28 | UGAGUGACAACGUACCCUUCAUUGA | 63 | UCAAUGAAGGGUACGUUGUCACUCACU | 64 |
| 29 | GAGUGACAACGUACCCUUCAUUGAU | 65 | AUCAAUGAAGGGUACGUUGUCACUCAC | 66 |
| 30 | AGUGACAACGUACCCUUCAUUGAUG | 67 | CAUCAAUGAAGGGUACGUUGUCACUCA | 68 |
| 31 | GUGACAACGUACCCUUCAUUGAUGC | 69 | GCAUCAAUGAAGGGUACGUUGUCACUC | 70 |
| 32 | UGACAACGUACCCUUCAUUGAUGCC | 71 | GGCAUCAAUGAAGGGUACGUUGUCACU | 72 |
| 33 | GACAACGUACCCUUCAUUGAUGCCA | 73 | UGGCAUCAAUGAAGGGUACGUUGUCAC | 74 |
| 34 | CAACGUACCCUUCAUUGAUGCCAAA | 75 | UUUGGCAUCAAUGAAGGGUACGUUGUC | 76 |
| 35 | AACGUACCCUUCAUUGAUGCCAAAA | 77 | UUUUGGCAUCAAUGAAGGGUACGUUGU | 78 |
| 36 | ACGUACCCUUCAUUGAUGCCAAAAC | 79 | GUUUUGGCAUCAAUGAAGGGUACGUUG | 80 |
| 37 | CGUACCCUUCAUUGAUGCCAAAACA | 81 | UGUUUUGGCAUCAAUGAAGGGUACGUU | 82 |
| 38 | UACCCUUCAUUGAUGCCAAAACAAC | 83 | GUUGUUUUGGCAUCAAUGAAGGGUACG | 84 |
| 39 | UUGAUGCCAAAACAACCAUCACCGU | 85 | ACGGUGAUGGUUGUUUUGGCAUCAAUG | 86 |
| 40 | GAUGCCAAAACAACCAUCACCGUGU | 87 | ACACGGUGAUGGUUGUUUUGGCAUCAA | 88 |
| 41 | AUGGGGAGUACGACAUCUGCCCUAA | 89 | UUAGGGCAGAUGUCGUACUCCCCAUAG | 90 |
| 42 | GUACGACAUCUGCCCUAAAGUCAAG | 91 | CUUGACUUUAGGGCAGAUGUCGUACUC | 92 |
| 43 | GACAUCUGCCCUAAAGUCAAGUCCA | 93 | UGGACUUGACUUUAGGGCAGAUGUCGU | 94 |
| 44 | ACAUCUGCCCUAAAGUCAAGUCCAC | 95 | GUGGACUUGACUUUAGGGCAGAUGUCG | 96 |
| 45 | GUCAAGUCCACGAACUUUCUUCAUG | 97 | CAUGAAGAAAGUUCGUGGACUUGACUU | 98 |
| 46 | UCAAGUCCACGAACUUUCUUCAUGU | 99 | ACAUGAAGAAAGUUCGUGGACUUGACU | 100 |
| 47 | CAAGUCCACGAACUUUCUUCAUGUG | 101 | CACAUGAAGAAAGUUCGUGGACUUGAC | 102 |
| 48 | GUCCACGAACUUUCUUCAUGUGGAC | 103 | GUCCACAUGAAGAAAGUUCGUGGACUU | 104 |
| 49 | CCACGAACUUUCUUCAUGUGGACAU | 105 | AUGUCCACAUGAAGAAAGUUCGUGGAC | 106 |
| 50 | CACGAACUUUCUUCAUGUGGACAUC | 107 | GAUGUCCACAUGAAGAAAGUUCGUGGA | 108 |
| 51 | ACGAACUUUCUUCAUGUGGACAUCA | 109 | UGAUGUCCACAUGAAGAAAGUUCGUGG | 110 |
| 52 | CGAACUUUCUUCAUGUGGACAUCAC | 111 | GUGAUGUCCACAUGAAGAAAGUUCGUG | 112 |
| 53 | GAACUUUCUUCAUGUGGACAUCACC | 113 | GGUGAUGUCCACAUGAAGAAAGUUCGU | 114 |
| 54 | AACUUUCUUCAUGUGGACAUCACCA | 115 | UGGUGAUGUCCACAUGAAGAAAGUUCG | 116 |
| 55 | ACUUUCUUCAUGUGGACAUCACCAA | 117 | UUGGUGAUGUCCACAUGAAGAAAGUUC | 118 |
| 56 | CUUUCUUCAUGUGGACAUCACCAAG | 119 | CUUGGUGAUGUCCACAUGAAGAAAGUU | 120 |
| 57 | UUUCUUCAUGUGGACAUCACCAAGC | 121 | GCUUGGUGAUGUCCACAUGAAGAAAGU | 122 |
| 58 | UUCUUCAUGUGGACAUCACCAAGCU | 123 | AGCUUGGUGAUGUCCACAUGAAGAAAG | 124 |
| 59 | CUUCAUGUGGACAUCACCAAGCUCA | 125 | UGAGCUUGGUGAUGUCCACAUGAAGAA | 126 |
| 60 | UUCAUGUGGACAUCACCAAGCUCAG | 127 | CUGAGCUUGGUGAUGUCCACAUGAAGA | 128 |
| 61 | UCAUGUGGACAUCACCAAGCUCAGU | 129 | ACUGAGCUUGGUGAUGUCCACAUGAAG | 130 |
| 62 | CAUGUGGACAUCACCAAGCUCAGUC | 131 | GACUGAGCUUGGUGAUGUCCACAUGAA | 132 |
| 63 | AUGUGGACAUCACCAAGCUCAGUCU | 133 | AGACUGAGCUUGGUGAUGUCCACAUGA | 134 |
| 64 | UGUGGACAUCACCAAGCUCAGUCUA | 135 | UAGACUGAGCUUGGUGAUGUCCACAUG | 136 |
| 65 | GUGGACAUCACCAAGCUCAGUCUAC | 137 | GUAGACUGAGCUUGGUGAUGUCCACAU | 138 |
| 66 | UGGACAUCACCAAGCUCAGUCUACG | 139 | CGUAGACUGAGCUUGGUGAUGUCCACA | 140 |
| 67 | AGCUUUUGUCCCCCCGGAUCUCAAG | 141 | CUUGAGAUCCGGGGGGACAAAAGCUCU | 142 |
| 68 | AAGGUGCUGGGAGAGAUAUGCCUUC | 143 | GAAGGCAUAUCUCUCCCAGCACCUUGA | 144 |
| 69 | GGGAGAGAUAUGCCUUCGAGGAUAU | 145 | AUAUCCUCGAAGGCAUAUCUCUCCCAG | 146 |
| 70 | GGAGAGAUAUGCCUUCGAGGAUAUU | 147 | AAUAUCCUCGAAGGCAUAUCUCUCCCA | 148 |
| 71 | AGAGAUAUGCCUUCGAGGAUAUUUG | 149 | CAAAUAUCCUCGAAGGCAUAUCUCUCC | 150 |
| 72 | GAGAUAUGCCUUCGAGGAUAUUUGG | 151 | CCAAAUAUCCUCGAAGGCAUAUCUCUC | 152 |
| 73 | AGAUAUGCCUUCGAGGAUAUUUGGA | 153 | UCCAAAUAUCCUCGAAGGCAUAUCUCU | 154 |
| 74 | GAUAUGCCUUCGAGGAUAUUUGGAU | 155 | AUCCAAAUAUCCUCGAAGGCAUAUCUC | 156 |
| 72 | AUAUGCCUUCGAGGAUAUUUGGAUG | 157 | CAUCCAAAUAUCCUCGAAGGCAUAUCU | 158 |
| 76 | AUGCCUUCGAGGAUAUUUGGAUGCA | 159 | UGCAUCCAAAUAUCCUCGAAGGCAUAU | 160 |
| 77 | UGCCUUCGAGGAUAUUUGGAUGCAU | 161 | AUGCAUCCAAAUAUCCUCGAAGGCAUA | 162 |
| 78 | GCCUUCGAGGAUAUUUGGAUGCAUU | 163 | AAUGCAUCCAAAUAUCCUCGAAGGCAU | 164 |
| 79 | UCAGGUUCUUGGAAGAGAAGGGCAU | 165 | AUGCCCUUCUCUUCCAAGAACCUGAAU | 166 |
| 80 | CAGGUUCUUGGAAGAGAAGGGCAUC | 167 | GAUGCCCUUCUCUUCCAAGAACCUGAA | 168 |
| 81 | AGGUUCUUGGAAGAGAAGGGCAUCU | 169 | AGAUGCCCUUCUCUUCCAAGAACCUGA | 170 |
| 82 | GGUUCUUGGAAGAGAAGGGCAUCUG | 171 | CAGAUGCCCUUCUCUUCCAAGAACCUG | 172 |
| 83 | UGGAAGAGAAGGGCAUCUGCAACAG | 173 | CUGUUGCAGAUGCCCUUCUCUUCCAAG | 174 |
| 84 | UGAAGUCAUCCUCAGAAGGGAUGGA | 175 | UCCAUCCCUUCUGAGGAUGACUUCAGG | 176 |
| 85 | GAAGUCAUCCUCAGAAGGGAUGGAU | 177 | AUCCAUCCCUUCUGAGGAUGACUUCAG | 178 |
| 86 | AAGUCAUCCUCAGAAGGGAUGGAUC | 179 | GAUCCAUCCCUUCUGAGGAUGACUUCA | 180 |
| 87 | GUCAUCCUCAGAAGGGAUGGAUCCU | 181 | AGGAUCCAUCCCUUCUGAGGAUGACUU | 182 |
| 88 | CAUCCUCAGAAGGGAUGGAUCCUGA | 183 | UCAGGAUCCAUCCCUUCUGAGGAUGAC | 184 |
| 89 | AUCCUCAGAAGGGAUGGAUCCUGAG | 185 | CUCAGGAUCCAUCCCUUCUGAGGAUGA | 186 |
| 90 | CUAGACCACCUGCGUCUCAGCAUCC | 187 | GGAUGCUGAGACGCAGGUGGUCUAGCA | 188 |
| 91 | AGUGAAGAAAUGAAAGACAAAGGUG | 189 | CACCUUUGUCUUUCAUUUCUUCACUCA | 190 |
| 92 | GUGAAGAAAUGAAAGACAAAGGUGG | 191 | CCACCUUUGUCUUUCAUUUCUUCACUC | 192 |
| 93 | UGAAGAAAUGAAAGACAAAGGUGGA | 193 | UCCACCUUUGUCUUUCAUUUCUUCACU | 194 |
| 94 | GAAGAAAUGAAAGACAAAGGUGGAU | 195 | AUCCACCUUUGUCUUUCAUUUCUUCAC | 196 |
| 95 | AAGAAAUGAAAGACAAAGGUGGAUA | 197 | UAUCCACCUUUGUCUUUCAUUUCUUCA | 198 |
| 96 | AGAAAUGAAAGACAAAGGUGGAUAC | 199 | GUAUCCACCUUUGUCUUUCAUUUCUUC | 200 |
| 97 | GAAAUGAAAGACAAAGGUGGAUACA | 201 | UGUAUCCACCUUUGUCUUUCAUUUCUU | 202 |
| 98 | AAAUGAAAGACAAAGGUGGAUACAU | 203 | AUGUAUCCACCUUUGUCUUUCAUUUCU | 204 |
| 99 | AAUGAAAGACAAAGGUGGAUACAUG | 205 | CAUGUAUCCACCUUUGUCUUUCAUUUC | 206 |
| 100 | AUGAAAGACAAAGGUGGAUACAUGA | 207 | UCAUGUAUCCACCUUUGUCUUUCAUUU | 208 |
| 101 | UGAAAGACAAAGGUGGAUACAUGAG | 209 | CUCAUGUAUCCACCUUUGUCUUUCAUU | 210 |
| 102 | GAAAGACAAAGGUGGAUACAUGAGC | 211 | GCUCAUGUAUCCACCUUUGUCUUUCAU | 212 |
| 103 | AAGACAAAGGUGGAUACAUGAGCAA | 213 | UUGCUCAUGUAUCCACCUUUGUCUUUC | 214 |
| 104 | AGACAAAGGUGGAUACAUGAGCAAG | 215 | CUUGCUCAUGUAUCCACCUUUGUCUUU | 216 |
| 105 | GACAAAGGUGGAUACAUGAGCAAGA | 217 | UCUUGCUCAUGUAUCCACCUUUGUCUU | 218 |
| 106 | ACAAAGGUGGAUACAUGAGCAAGAU | 219 | AUCUUGCUCAUGUAUCCACCUUUGUCU | 220 |
| 107 | AAGGUGGAUACAUGAGCAAGAUUUG | 221 | CAAAUCUUGCUCAUGUAUCCACCUUUG | 222 |
| 108 | AGGUGGAUACAUGAGCAAGAUUUGC | 223 | GCAAAUCUUGCUCAUGUAUCCACCUUU | 224 |
| 109 | UGGAUACAUGAGCAAGAUUUGCAAC | 225 | GUUGCAAAUCUUGCUCAUGUAUCCACC | 226 |
| 110 | GGAUACAUGAGCAAGAUUUGCAACU | 227 | AGUUGCAAAUCUUGCUCAUGUAUCCAC | 228 |
| 111 | GAUACAUGAGCAAGAUUUGCAACUU | 229 | AAGUUGCAAAUCUUGCUCAUGUAUCCA | 230 |
| 112 | AUACAUGAGCAAGAUUUGCAACUUG | 231 | CAAGUUGCAAAUCUUGCUCAUGUAUCC | 232 |
| 113 | UACAUGAGCAAGAUUUGCAACUUGC | 233 | GCAAGUUGCAAAUCUUGCUCAUGUAUC | 234 |
| 114 | ACAUGAGCAAGAUUUGCAACUUGCU | 235 | AGCAAGUUGCAAAUCUUGCUCAUGUAU | 236 |
| 115 | CAUGAGCAAGAUUUGCAACUUGCUA | 237 | UAGCAAGUUGCAAAUCUUGCUCAUGUA | 238 |
| 116 | AUGAGCAAGAUUUGCAACUUGCUAC | 239 | GUAGCAAGUUGCAAAUCUUGCUCAUGU | 240 |
| 117 | UGAGCAAGAUUUGCAACUUGCUACC | 241 | GGUAGCAAGUUGCAAAUCUUGCUCAUG | 242 |
| 118 | GAGCAAGAUUUGCAACUUGCUACCC | 243 | GGGUAGCAAGUUGCAAAUCUUGCUCAU | 244 |
| 119 | AGCAAGAUUUGCAACUUGCUACCCA | 245 | UGGGUAGCAAGUUGCAAAUCUUGCUCA | 246 |
| 120 | GCAAGAUUUGCAACUUGCUACCCAU | 247 | AUGGGUAGCAAGUUGCAAAUCUUGCUC | 248 |
| 121 | CAAGAUUUGCAACUUGCUACCCAUU | 249 | AAUGGGUAGCAAGUUGCAAAUCUUGCU | 250 |
| 122 | AAGAUUUGCAACUUGCUACCCAUUA | 251 | UAAUGGGUAGCAAGUUGCAAAUCUUGC | 252 |
| 123 | AGAUUUGCAACUUGCUACCCAUUAG | 253 | CUAAUGGGUAGCAAGUUGCAAAUCUUG | 254 |
| 124 | GAUUUGCAACUUGCUACCCAUUAGG | 255 | CCUAAUGGGUAGCAAGUUGCAAAUCUU | 256 |
| 125 | AUUUGCAACUUGCUACCCAUUAGGA | 257 | UCCUAAUGGGUAGCAAGUUGCAAAUCU | 258 |
| 126 | UUUGCAACUUGCUACCCAUUAGGAU | 259 | AUCCUAAUGGGUAGCAAGUUGCAAAUC | 260 |
| 127 | UUGCAACUUGCUACCCAUUAGGAUA | 261 | UAUCCUAAUGGGUAGCAAGUUGCAAAU | 262 |
| 128 | UGCAACUUGCUACCCAUUAGGAUAA | 263 | UUAUCCUAAUGGGUAGCAAGUUGCAAA | 264 |
| 129 | GCAACUUGCUACCCAUUAGGAUAAU | 265 | AUUAUCCUAAUGGGUAGCAAGUUGCAA | 266 |
| 130 | CAACUUGCUACCCAUUAGGAUAAUG | 267 | CAUUAUCCUAAUGGGUAGCAAGUUGCA | 268 |
| 131 | CUUGCUACCCAUUAGGAUAAUGUCU | 269 | AGACAUUAUCCUAAUGGGUAGCAAGUU | 270 |
| 132 | UUGCUACCCAUUAGGAUAAUGUCUU | 271 | AAGACAUUAUCCUAAUGGGUAGCAAGU | 272 |
| 133 | UGCUACCCAUUAGGAUAAUGUCUUA | 273 | UAAGACAUUAUCCUAAUGGGUAGCAAG | 274 |
| 134 | AUUAGGAUAAUGUCUUAUGUAAUGC | 275 | GCAUUACAUAAGACAUUAUCCUAAUGG | 276 |
| 135 | UUAGGAUAAUGUCUUAUGUAAUGCU | 277 | AGCAUUACAUAAGACAUUAUCCUAAUG | 278 |
| 136 | CUGUGGAAUCUGCCAUUGCGAUUGU | 279 | ACAAUCGCAAUGGCAGAUUCCACAGGC | 280 |
| 137 | GGAAUCUGCCAUUGCGAUUGUCCAG | 281 | CUGGACAAUCGCAAUGGCAGAUUCCAC | 282 |
| 138 | GAAUCUGCCAUUGCGAUUGUCCAGA | 283 | UCUGGACAAUCGCAAUGGCAGAUUCCA | 284 |
| 139 | AAUCUGCCAUUGCGAUUGUCCAGAG | 285 | CUCUGGACAAUCGCAAUGGCAGAUUCC | 286 |
| 140 | AUCUGCCAUUGCGAUUGUCCAGAGA | 287 | UCUCUGGACAAUCGCAAUGGCAGAUUC | 288 |
| 141 | CCAUUGCGAUUGUCCAGAGACUGGU | 289 | ACCAGUCUCUGGACAAUCGCAAUGGCA | 290 |
| 142 | CAUUGCGAUUGUCCAGAGACUGGUG | 291 | CACCAGUCUCUGGACAAUCGCAAUGGC | 292 |
| 143 | AUUGCGAUUGUCCAGAGACUGGUGA | 293 | UCACCAGUCUCUGGACAAUCGCAAUGG | 294 |
| 144 | UUGCGAUUGUCCAGAGACUGGUGAC | 295 | GUCACCAGUCUCUGGACAAUCGCAAUG | 296 |
| 145 | UGCGAUUGUCCAGAGACUGGUGACA | 297 | UGUCACCAGUCUCUGGACAAUCGCAAU | 298 |
| 146 | GCGAUUGUCCAGAGACUGGUGACAU | 299 | AUGUCACCAGUCUCUGGACAAUCGCAA | 300 |
| 147 | CGAUUGUCCAGAGACUGGUGACAUG | 301 | CAUGUCACCAGUCUCUGGACAAUCGCA | 302 |
| 148 | AUUGUCCAGAGACUGGUGACAUGGC | 303 | GCCAUGUCACCAGUCUCUGGACAAUCG | 304 |
| 149 | GUCCAGAGACUGGUGACAUGGCUUC | 305 | GAAGCCAUGUCACCAGUCUCUGGACAA | 306 |
| 150 | CCAGAGACUGGUGACAUGGCUUCCA | 307 | UGGAAGCCAUGUCACCAGUCUCUGGAC | 308 |
| 151 | CAGAGACUGGUGACAUGGCUUCCAG | 309 | CUGGAAGCCAUGUCACCAGUCUCUGGA | 310 |
| 152 | AGAGACUGGUGACAUGGCUUCCAGA | 311 | UCUGGAAGCCAUGUCACCAGUCUCUGG | 312 |
| 153 | GAGACUGGUGACAUGGCUUCCAGAU | 313 | AUCUGGAAGCCAUGUCACCAGUCUCUG | 314 |
| 154 | AGACUGGUGACAUGGCUUCCAGAUA | 315 | UAUCUGGAAGCCAUGUCACCAGUCUCU | 316 |
| 155 | GACUGGUGACAUGGCUUCCAGAUAU | 317 | AUAUCUGGAAGCCAUGUCACCAGUCUC | 318 |
| 156 | ACUGGUGACAUGGCUUCCAGAUAUG | 319 | CAUAUCUGGAAGCCAUGUCACCAGUCU | 320 |
| 157 | CUGGUGACAUGGCUUCCAGAUAUGC | 321 | GCAUAUCUGGAAGCCAUGUCACCAGUC | 322 |
| 158 | GACAUGGCUUCCAGAUAUGCCCGAC | 323 | GUCGGGCAUAUCUGGAAGCCAUGUCAC | 324 |
| 159 | CAUGGCUUCCAGAUAUGCCCGACGA | 325 | UCGUCGGGCAUAUCUGGAAGCCAUGUC | 326 |
| 160 | CAGAUAUGCCCGACGAUGUCCUGUG | 327 | CACAGGACAUCGUCGGGCAUAUCUGGA | 328 |
| 161 | CUCACAGGUGUUCACUCGAGUGCUG | 329 | CAGCACUCGAGUGAACACCUGUGAGGU | 330 |
| 162 | CACUCGAGUGCUGAUGUGUCUGCUC | 331 | GAGCAGACACAUCAGCACUCGAGUGAA | 332 |
| 163 | CUCGAGUGCUGAUGUGUCUGCUCCC | 333 | GGGAGCAGACACAUCAGCACUCGAGUG | 334 |
| 164 | CCCAAAUGCCAGUGAGCAGCCAACA | 335 | UGUUGGCUGCUCACUGGCAUUUGGGAC | 336 |
| 165 | UCAGGUCCAGCCUGAACUUCUUCUU | 337 | AAGAAGAAGUUCAGGCUGGACCUGAGG | 338 |
| 166 | CAGGUCCAGCCUGAACUUCUUCUUG | 339 | CAAGAAGAAGUUCAGGCUGGACCUGAG | 340 |
| 167 | AGGUCCAGCCUGAACUUCUUCUUGG | 341 | CCAAGAAGAAGUUCAGGCUGGACCUGA | 342 |
| 168 | CAAUAAAGUACCUGCUGGUGCUGAG | 343 | CUCAGCACCAGCAGGUACUUUAUUGCC | 344 |
| 169 | AAUAAAGUACCUGCUGGUGCUGAGG | 345 | CCUCAGCACCAGCAGGUACUUUAUUGC | 346 |
| 170 | AUAAAGUACCUGCUGGUGCUGAGGG | 347 | CCCUCAGCACCAGCAGGUACUUUAUUG | 348 |
| 171 | CUCUCCACCUUUCCCAGUUUUUCAC | 349 | GUGAAAAACUGGGAAAGGUGGAGAGCC | 350 |
| 172 | CUCCACCUUUCCCAGUUUUUCACUA | 351 | UAGUGAAAAACUGGGAAAGGUGGAGAG | 352 |
| 173 | UCCACCUUUCCCAGUUUUUCACUAG | 353 | CUAGUGAAAAACUGGGAAAGGUGGAGA | 354 |
| 174 | CCACCUUUCCCAGUUUUUCACUAGA | 355 | UCUAGUGAAAAACUGGGAAAGGUGGAG | 356 |
| 175 | CACCUUUCCCAGUUUUUCACUAGAG | 357 | CUCUAGUGAAAAACUGGGAAAGGUGGA | 358 |
| 176 | ACCUUUCCCAGUUUUUCACUAGAGA | 359 | UCUCUAGUGAAAAACUGGGAAAGGUGG | 360 |
| 177 | CCUUUCCCAGUUUUUCACUAGAGAA | 361 | UUCUCUAGUGAAAAACUGGGAAAGGUG | 362 |
| 178 | AGUUUUUCACUAGAGAAGAGUCUGU | 363 | ACAGACUCUUCUCUAGUGAAAAACUGG | 364 |
| 179 | UCUAGCAGAUUCUUUCAGAGGUGCU | 365 | AGCACCUCUGAAAGAAUCUGCUAGACU | 366 |
| 180 | AGCAGAUUCUUUCAGAGGUGCUAAA | 367 | UUUAGCACCUCUGAAAGAAUCUGCUAG | 368 |
| 181 | GCAGAUUCUUUCAGAGGUGCUAAAG | 369 | CUUUAGCACCUCUGAAAGAAUCUGCUA | 370 |
| 182 | CAGAUUCUUUCAGAGGUGCUAAAGU | 371 | ACUUUAGCACCUCUGAAAGAAUCUGCU | 372 |
| 183 | AGAUUCUUUCAGAGGUGCUAAAGUU | 373 | AACUUUAGCACCUCUGAAAGAAUCUGC | 374 |
| 184 | GAUUCUUUCAGAGGUGCUAAAGUUU | 375 | AAACUUUAGCACCUCUGAAAGAAUCUG | 376 |
| 185 | AUUCUUUCAGAGGUGCUAAAGUUUC | 377 | GAAACUUUAGCACCUCUGAAAGAAUCU | 378 |
| 186 | AGGUGCUAAAGUUUCCCAUCUUUGU | 379 | ACAAAGAUGGGAAACUUUAGCACCUCU | 380 |
| 187 | GGUGCUAAAGUUUCCCAUCUUUGUG | 381 | CACAAAGAUGGGAAACUUUAGCACCUC | 382 |
| 188 | GUGCUAAAGUUUCCCAUCUUUGUGC | 383 | GCACAAAGAUGGGAAACUUUAGCACCU | 384 |
| 189 | GCUAAAGUUUCCCAUCUUUGUGCAG | 385 | CUGCACAAAGAUGGGAAACUUUAGCAC | 386 |
| 190 | CUAAAGUUUCCCAUCUUUGUGCAGC | 387 | GCUGCACAAAGAUGGGAAACUUUAGCA | 388 |
| 191 | UAAAGUUUCCCAUCUUUGUGCAGCU | 389 | AGCUGCACAAAGAUGGGAAACUUUAGC | 390 |
| 192 | AAAGUUUCCCAUCUUUGUGCAGCUA | 391 | UAGCUGCACAAAGAUGGGAAACUUUAG | 392 |
| 193 | AAGUUUCCCAUCUUUGUGCAGCUAC | 393 | GUAGCUGCACAAAGAUGGGAAACUUUA | 394 |
| 194 | AGUUUCCCAUCUUUGUGCAGCUACC | 395 | GGUAGCUGCACAAAGAUGGGAAACUUU | 396 |
| 195 | GUUUCCCAUCUUUGUGCAGCUACCU | 397 | AGGUAGCUGCACAAAGAUGGGAAACUU | 398 |
| 196 | AUCUUUGUGCAGCUACCUCCGCAUU | 399 | AAUGCGGAGGUAGCUGCACAAAGAUGG | 400 |
| 197 | GUGCAGCUACCUCCGCAUUGCUGUG | 401 | CACAGCAAUGCGGAGGUAGCUGCACAA | 402 |
| 198 | CCAGCCUCUGAGCUGAGUUGGUUUU | 403 | AAAACCAACUCAGCUCAGAGGCUGGGA | 404 |
| 199 | CAGCCUCUGAGCUGAGUUGGUUUUA | 405 | UAAAACCAACUCAGCUCAGAGGCUGGG | 406 |
| 200 | AGCCUCUGAGCUGAGUUGGUUUUAU | 407 | AUAAAACCAACUCAGCUCAGAGGCUGG | 408 |
| 201 | GCCUCUGAGCUGAGUUGGUUUUAUG | 409 | CAUAAAACCAACUCAGCUCAGAGGCUG | 410 |
| 202 | CCUCUGAGCUGAGUUGGUUUUAUGA | 411 | UCAUAAAACCAACUCAGCUCAGAGGCU | 412 |
| 203 | CUCUGAGCUGAGUUGGUUUUAUGAA | 413 | UUCAUAAAACCAACUCAGCUCAGAGGC | 414 |
| 204 | UCUGAGCUGAGUUGGUUUUAUGAAA | 415 | UUUCAUAAAACCAACUCAGCUCAGAGG | 416 |
| 205 | UGAGCUGAGUUGGUUUUAUGAAAAG | 417 | CUUUUCAUAAAACCAACUCAGCUCAGA | 418 |
| 206 | UGAGUUGGUUUUAUGAAAAGCUAGG | 419 | CCUAGCUUUUCAUAAAACCAACUCAGC | 420 |
| 207 | GAGUUGGUUUUAUGAAAAGCUAGGA | 421 | UCCUAGCUUUUCAUAAAACCAACUCAG | 422 |
| 208 | UUGGUUUUAUGAAAAGCUAGGAAGC | 423 | GCUUCCUAGCUUUUCAUAAAACCAACU | 424 |
| 209 | UGGUUUUAUGAAAAGCUAGGAAGCA | 425 | UGCUUCCUAGCUUUUCAUAAAACCAAC | 426 |
| 210 | GGUUUUAUGAAAAGCUAGGAAGCAA | 427 | UUGCUUCCUAGCUUUUCAUAAAACCAA | 428 |
| 211 | UUUUAUGAAAAGCUAGGAAGCAACC | 429 | GGUUGCUUCCUAGCUUUUCAUAAAACC | 430 |
| 212 | UUAUGAAAAGCUAGGAAGCAACCUU | 431 | AAGGUUGCUUCCUAGCUUUUCAUAAAA | 432 |
| 213 | UAUGAAAAGCUAGGAAGCAACCUUU | 433 | AAAGGUUGCUUCCUAGCUUUUCAUAAA | 434 |
| 214 | AUGAAAAGCUAGGAAGCAACCUUUC | 435 | GAAAGGUUGCUUCCUAGCUUUUCAUAA | 436 |
| 215 | CCAGCACUUAACUCUAAUACAUCAG | 437 | CUGAUGUAUUAGAGUUAAGUGCUGGAC | 438 |
| 216 | CAGCACUUAACUCUAAUACAUCAGC | 439 | GCUGAUGUAUUAGAGUUAAGUGCUGGA | 440 |
| 217 | UAAUACAUCAGCAUGCGUUAAUUCA | 441 | UGAAUUAACGCAUGCUGAUGUAUUAGA | 442 |
| 218 | AAUACAUCAGCAUGCGUUAAUUCAG | 443 | CUGAAUUAACGCAUGCUGAUGUAUUAG | 444 |
| 219 | AGCAUGCGUUAAUUCAGCUGGUUGG | 445 | CCAACCAGCUGAAUUAACGCAUGCUGA | 446 |
| 220 | GCAUGCGUUAAUUCAGCUGGUUGGG | 447 | CCCAACCAGCUGAAUUAACGCAUGCUG | 448 |
| 221 | UGCGUUAAUUCAGCUGGUUGGGAAA | 449 | UUUCCCAACCAGCUGAAUUAACGCAUG | 450 |
| 222 | GCGUUAAUUCAGCUGGUUGGGAAAU | 451 | AUUUCCCAACCAGCUGAAUUAACGCAU | 452 |
| 223 | CGUUAAUUCAGCUGGUUGGGAAAUG | 453 | CAUUUCCCAACCAGCUGAAUUAACGCA | 454 |
| 224 | GUUAAUUCAGCUGGUUGGGAAAUGA | 455 | UCAUUUCCCAACCAGCUGAAUUAACGC | 456 |
| 225 | UUAAUUCAGCUGGUUGGGAAAUGAC | 457 | GUCAUUUCCCAACCAGCUGAAUUAACG | 458 |
| 226 | UAAUUCAGCUGGUUGGGAAAUGACA | 459 | UGUCAUUUCCCAACCAGCUGAAUUAAC | 460 |
| 227 | AUUCAGCUGGUUGGGAAAUGACACC | 461 | GGUGUCAUUUCCCAACCAGCUGAAUUA | 462 |
| 228 | UUCAGCUGGUUGGGAAAUGACACCA | 463 | UGGUGUCAUUUCCCAACCAGCUGAAUU | 464 |
| 229 | UCAGCUGGUUGGGAAAUGACACCAG | 465 | CUGGUGUCAUUUCCCAACCAGCUGAAU | 466 |
| 230 | CAGCUGGUUGGGAAAUGACACCAGG | 467 | CCUGGUGUCAUUUCCCAACCAGCUGAA | 468 |
| 231 | AGCUGGUUGGGAAAUGACACCAGGA | 469 | UCCUGGUGUCAUUUCCCAACCAGCUGA | 470 |
| 232 | GCUGGUUGGGAAAUGACACCAGGAA | 471 | UUCCUGGUGUCAUUUCCCAACCAGCUG | 472 |
| 233 | GCAGAGGGUCCCUUACUGACUGUUU | 473 | AAACAGUCAGUAAGGGACCCUCUGCAC | 474 |
| 234 | CAGAGGGUCCCUUACUGACUGUUUC | 475 | GAAACAGUCAGUAAGGGACCCUCUGCA | 476 |
| 235 | AGAGGGUCCCUUACUGACUGUUUCG | 477 | CGAAACAGUCAGUAAGGGACCCUCUGC | 478 |
| 236 | CCUAUUAAUGGUCAGACUGUUCCAG | 479 | CUGGAACAGUCUGACCAUUAAUAGGGC | 480 |
| 237 | CUAUUAAUGGUCAGACUGUUCCAGC | 481 | GCUGGAACAGUCUGACCAUUAAUAGGG | 482 |
| 238 | UAUUAAUGGUCAGACUGUUCCAGCA | 483 | UGCUGGAACAGUCUGACCAUUAAUAGG | 484 |
| 239 | AUUAAUGGUCAGACUGUUCCAGCAU | 485 | AUGCUGGAACAGUCUGACCAUUAAUAG | 486 |
| 240 | UUAAUGGUCAGACUGUUCCAGCAUG | 487 | CAUGCUGGAACAGUCUGACCAUUAAUA | 488 |
| 241 | UAAUGGUCAGACUGUUCCAGCAUGA | 489 | UCAUGCUGGAACAGUCUGACCAUUAAU | 490 |
| 242 | AAUGGUCAGACUGUUCCAGCAUGAG | 491 | CUCAUGCUGGAACAGUCUGACCAUUAA | 492 |
| 243 | AGAACGACACUGCCUGUCAGGUGGU | 493 | ACCACCUGACAGGCAGUGUCGUUCUUG | 494 |
| 244 | CGACACUGCCUGUCAGGUGGUCUGC | 495 | GCAGACCACCUGACAGGCAGUGUCGUU | 496 |
| 245 | AACCUUGACUACUAAAAACGUCUCC | 497 | GGAGACGUUUUUAGUAGUCAAGGUUAU | 498 |
| 246 | UUUAGAACACCUUUUUCACCUAACU | 499 | AGUUAGGUGAAAAAGGUGUUCUAAAAU | 500 |
| 247 | UUAGAACACCUUUUUCACCUAACUA | 501 | UAGUUAGGUGAAAAAGGUGUUCUAAAA | 502 |
| 248 | UAGAACACCUUUUUCACCUAACUAA | 503 | UUAGUUAGGUGAAAAAGGUGUUCUAAA | 504 |
| 249 | AGAACACCUUUUUCACCUAACUAAA | 505 | UUUAGUUAGGUGAAAAAGGUGUUCUAA | 506 |
| 250 | GAACACCUUUUUCACCUAACUAAAA | 507 | UUUUAGUUAGGUGAAAAAGGUGUUCUA | 508 |
| 251 | AACACCUUUUUCACCUAACUAAAAU | 509 | AUUUUAGUUAGGUGAAAAAGGUGUUCU | 510 |
| 252 | ACACCUUUUUCACCUAACUAAAAUA | 511 | UAUUUUAGUUAGGUGAAAAAGGUGUUC | 512 |
| 253 | CACCUUUUUCACCUAACUAAAAUAA | 513 | UUAUUUUAGUUAGGUGAAAAAGGUGUU | 514 |
| 254 | ACCUUUUUCACCUAACUAAAAUAAU | 515 | AUUAUUUUAGUUAGGUGAAAAAGGUGU | 516 |
| 255 | CUUUUUCACCUAACUAAAAUAAUGU | 517 | ACAUUAUUUUAGUUAGGUGAAAAAGGU | 518 |
| 256 | UUUUCACCUAACUAAAAUAAUGUUU | 519 | AAACAUUAUUUUAGUUAGGUGAAAAAG | 520 |
| 257 | UUCACCUAACUAAAAUAAUGUUUAA | 521 | UUAAACAUUAUUUUAGUUAGGUGAAAA | 522 |
| 258 | UCACCUAACUAAAAUAAUGUUUAAA | 523 | UUUAAACAUUAUUUUAGUUAGGUGAAA | 524 |
| 259 | CACCUAACUAAAAUAAUGUUUAAAG | 525 | CUUUAAACAUUAUUUUAGUUAGGUGAA | 526 |
| 260 | ACCUAACUAAAAUAAUGUUUAAAGA | 527 | UCUUUAAACAUUAUUUUAGUUAGGUGA | 528 |
| 261 | CCUAACUAAAAUAAUGUUUAAAGAG | 529 | CUCUUUAAACAUUAUUUUAGUUAGGUG | 530 |
| 262 | CUAACUAAAAUAAUGUUUAAAGAGU | 531 | ACUCUUUAAACAUUAUUUUAGUUAGGU | 532 |
| 263 | UAACUAAAAUAAUGUUUAAAGAGUU | 533 | AACUCUUUAAACAUUAUUUUAGUUAGG | 534 |
| 264 | AACUAAAAUAAUGUUUAAAGAGUUU | 535 | AAACUCUUUAAACAUUAUUUUAGUUAG | 536 |
| 265 | ACUAAAAUAAUGUUUAAAGAGUUUU | 537 | AAAACUCUUUAAACAUUAUUUUAGUUA | 538 |
| 266 | CUAAAAUAAUGUUUAAAGAGUUUUG | 539 | CAAAACUCUUUAAACAUUAUUUUAGUU | 540 |
| 267 | UAAAAUAAUGUUUAAAGAGUUUUGU | 541 | ACAAAACUCUUUAAACAUUAUUUUAGU | 542 |
| 268 | AAGAGUUUUGUAUAAAAAUGUAAGG | 543 | CCUUACAUUUUUAUACAAAACUCUUUA | 544 |
| 269 | GUUUUGUAUAAAAAUGUAAGGAAGC | 545 | GCUUCCUUACAUUUUUAUACAAAACUC | 546 |
| 270 | UUUUGUAUAAAAAUGUAAGGAAGCG | 547 | CGCUUCCUUACAUUUUUAUACAAAACU | 548 |
| 271 | UUUGUAUAAAAAUGUAAGGAAGCGU | 549 | ACGCUUCCUUACAUUUUUAUACAAAAC | 550 |
| 272 | UUGUAUAAAAAUGUAAGGAAGCGUU | 551 | AACGCUUCCUUACAUUUUUAUACAAAA | 552 |
| 273 | UGUAUAAAAAUGUAAGGAAGCGUUG | 553 | CAACGCUUCCUUACAUUUUUAUACAAA | 554 |
| 274 | GUAUAAAAAUGUAAGGAAGCGUUGU | 555 | ACAACGCUUCCUUACAUUUUUAUACAA | 556 |
| 275 | AUGUAAGGAAGCGUUGUUACCUGUU | 557 | AACAGGUAACAACGCUUCCUUACAUUU | 558 |
| 276 | UUUUGUAUUAUGUGAAUCAGUGAGA | 559 | UCUCACUGAUUCACAUAAUACAAAAUU | 560 |
| 277 | UUUGUAUUAUGUGAAUCAGUGAGAU | 561 | AUCUCACUGAUUCACAUAAUACAAAAU | 562 |
| 278 | UUGUAUUAUGUGAAUCAGUGAGAUG | 563 | CAUCUCACUGAUUCACAUAAUACAAAA | 564 |
| 279 | UGUAUUAUGUGAAUCAGUGAGAUGU | 565 | ACAUCUCACUGAUUCACAUAAUACAAA | 566 |
| 280 | GUAUUAUGUGAAUCAGUGAGAUGUU | 567 | AACAUCUCACUGAUUCACAUAAUACAA | 568 |
| 281 | UAUUAUGUGAAUCAGUGAGAUGUUA | 569 | UAACAUCUCACUGAUUCACAUAAUACA | 570 |
| 282 | AUUAUGUGAAUCAGUGAGAUGUUAG | 571 | CUAACAUCUCACUGAUUCACAUAAUAC | 572 |
| 283 | UUAUGUGAAUCAGUGAGAUGUUAGU | 573 | ACUAACAUCUCACUGAUUCACAUAAUA | 574 |
| 284 | UAUGUGAAUCAGUGAGAUGUUAGUA | 575 | UACUAACAUCUCACUGAUUCACAUAAU | 576 |
| 285 | AUGUGAAUCAGUGAGAUGUUAGUAG | 577 | CUACUAACAUCUCACUGAUUCACAUAA | 578 |
| 286 | UGUGAAUCAGUGAGAUGUUAGUAGA | 579 | UCUACUAACAUCUCACUGAUUCACAUA | 580 |
| 287 | GUGAAUCAGUGAGAUGUUAGUAGAA | 581 | UUCUACUAACAUCUCACUGAUUCACAU | 582 |
| 288 | GUGAGAUGUUAGUAGAAUAAGCCUU | 583 | AAGGCUUAUUCUACUAACAUCUCACUG | 584 |
| 289 | UUUUCUAUUUAUGCAUUUGAGUACA | 585 | UGUACUCAAAUGCAUAAAUAGAAAAAA | 586 |
| 290 | UUUCUAUUUAUGCAUUUGAGUACAG | 587 | CUGUACUCAAAUGCAUAAAUAGAAAAA | 588 |
| 291 | UUCUAUUUAUGCAUUUGAGUACAGT | 589 | ACUGUACUCAAAUGCAUAAAUAGAAAA | 590 |
| 292 | CUAUUUAUGCAUUUGAGUACAGUAC | 591 | GUACUGUACUCAAAUGCAUAAAUAGAA | 592 |
| 293 | UGCUCAAACUGUUAAAUGUUGGAAA | 593 | UUUCCAACAUUUAACAGUUUGAGCACA | 594 |
| 294 | GCUCAAACUGUUAAAUGUUGGAAAA | 595 | UUUUCCAACAUUUAACAGUUUGAGCAC | 596 |
| 295 | CUCAAACUGUUAAAUGUUGGAAAAG | 597 | CUUUUCCAACAUUUAACAGUUUGAGCA | 598 |
| 296 | UCAAACUGUUAAAUGUUGGAAAAGA | 599 | UCUUUUCCAACAUUUAACAGUUUGAGC | 600 |
| 297 | CAAACUGUUAAAUGUUGGAAAAGAA | 601 | UUCUUUUCCAACAUUUAACAGUUUGAG | 602 |
| 298 | AAACUGUUAAAUGUUGGAAAAGAAA | 603 | UUUCUUUUCCAACAUUUAACAGUUUGA | 604 |
| 299 | AACUGUUAAAUGUUGGAAAAGAAAG | 605 | CUUUCUUUUCCAACAUUUAACAGUUUG | 606 |
| 300 | ACUGUUAAAUGUUGGAAAAGAAAGA | 607 | UCUUUCUUUUCCAACAUUUAACAGUUU | 608 |
| 301 | CUGUUAAAUGUUGGAAAAGAAAGAT | 609 | AUCUUUCUUUUCCAACAUUUAACAGUU | 610 |
| 302 | UGUUAAAUGUUGGAAAAGAAAGATA | 611 | UAUCUUUCUUUUCCAACAUUUAACAGU | 612 |
| 303 | GUUAAAUGUUGGAAAAGAAAGAUAC | 613 | GUAUCUUUCUUUUCCAACAUUUAACAG | 614 |
| 304 | UUAAAUGUUGGAAAAGAAAGAUACA | 615 | UGUAUCUUUCUUUUCCAACAUUUAACA | 616 |
| 305 | UAAAUGUUGGAAAAGAAAGAUACAA | 617 | UUGUAUCUUUCUUUUCCAACAUUUAAC | 618 |
| 306 | GCACUUGACUGAGAAGACAGACCCT | 619 | AGGGUCUGUCUUCUCAGUCAAGUGCUU | 620 |
| 307 | GAGAAAAGAGGCUACUUGUGAAAAT | 621 | AUUUUCACAAGUAGCCUCUUUUCUCAA | 622 |
| 308 | AGAAAAGAGGCUACUUGUGAAAATA | 623 | UAUUUUCACAAGUAGCCUCUUUUCUCA | 624 |
| 309 | GAAAAGAGGCUACUUGUGAAAAUAA | 625 | UUAUUUUCACAAGUAGCCUCUUUUCUC | 626 |
| 310 | AAAAGAGGCUACUUGUGAAAAUAAT | 627 | AUUAUUUUCACAAGUAGCCUCUUUUCU | 628 |
| 311 | AAAGAGGCUACUUGUGAAAAUAATG | 629 | CAUUAUUUUCACAAGUAGCCUCUUUUC | 630 |
| 312 | AAGAGGCUACUUGUGAAAAUAAUGA | 631 | UCAUUAUUUUCACAAGUAGCCUCUUUU | 632 |
| 313 | AGAGGCUACUUGUGAAAAUAAUGAG | 633 | CUCAUUAUUUUCACAAGUAGCCUCUUU | 634 |
| 314 | GAGGCUACUUGUGAAAAUAAUGAGC | 635 | GCUCAUUAUUUUCACAAGUAGCCUCUU | 636 |
| 315 | GGCUACUUGUGAAAAUAAUGAGCCC | 637 | GGGCUCAUUAUUUUCACAAGUAGCCUC | 638 |
| 316 | CUACUUGUGAAAAUAAUGAGCCCCC | 639 | GGGGGCUCAUUAUUUUCACAAGUAGCC | 640 |
| 317 | UGAACCUGCCUUCUUACAUCUUGAG | 641 | CUCAAGAUGUAAGAAGGCAGGUUCAAA | 642 |
| 318 | AAAGUUACAAGUUUCUUUUCCCAAG | 643 | CUUGGGAAAAGAAACUUGUAACUUUCC | 644 |
| 319 | AAGUUACAAGUUUCUUUUCCCAAGT | 645 | ACUUGGGAAAAGAAACUUGUAACUUUC | 646 |
| 320 | AGUUACAAGUUUCUUUUCCCAAGTT | 647 | AACUUGGGAAAAGAAACUUGUAACUUU | 648 |
| 321 | AGUUUCUUUUCCCAAGUUUCCCAGT | 649 | ACUGGGAAACUUGGGAAAAGAAACUUG | 650 |
| 322 | CAACAGUAUUUUCUAAUAACCAGTA | 651 | UACUGGUUAUUAGAAAAUACUGUUGGC | 652 |
| 323 | AACAGUAUUUUCUAAUAACCAGUAT | 653 | AUACUGGUUAUUAGAAAAUACUGUUGG | 654 |
| 324 | ACAGUAUUUUCUAAUAACCAGUATA | 655 | UAUACUGGUUAUUAGAAAAUACUGUUG | 656 |
| 325 | CAGUAUUUUCUAAUAACCAGUAUAT | 657 | AUAUACUGGUUAUUAGAAAAUACUGUU | 658 |
| 326 | UUGUGAUUGUUAUCAGGAAAAAATA | 659 | UAUUUUUUCCUGAUAACAAUCACAAUA | 660 |
| 327 | UGUGAUUGUUAUCAGGAAAAAAUAT | 661 | AUAUUUUUUCCUGAUAACAAUCACAAU | 662 |
| 328 | GUGAUUGUUAUCAGGAAAAAAUATA | 663 | UAUAUUUUUUCCUGAUAACAAUCACAA | 664 |
| 329 | UGAUUGUUAUCAGGAAAAAAUAUAT | 665 | AUAUAUUUUUUCCUGAUAACAAUCACA | 666 |
| 330 | GAUUGUUAUCAGGAAAAAAUAUATT | 667 | AAUAUAUUUUUUCCUGAUAACAAUCAC | 668 |
| 331 | AUUGUUAUCAGGAAAAAAUAUAUTA | 669 | UAAUAUAUUUUUUCCUGAUAACAAUCA | 670 |
| 332 | UUGUUAUCAGGAAAAAAUAUAUUAA | 671 | UUAAUAUAUUUUUUCCUGAUAACAAUC | 672 |
| 333 | UGUUAUCAGGAAAAAAUAUAUUAAA | 673 | UUUAAUAUAUUUUUUCCUGAUAACAAU | 674 |
| 334 | GUUAUCAGGAAAAAAUAUAUUAAAT | 675 | AUUUAAUAUAUUUUUUCCUGAUAACAA | 676 |
| 335 | UUAUCAGGAAAAAAUAUAUUAAATG | 677 | CAUUUAAUAUAUUUUUUCCUGAUAACA | 678 |
| 336 | UAUCAGGAAAAAAUAUAUUAAAUGG | 679 | CCAUUUAAUAUAUUUUUUCCUGAUAAC | 680 |
| 337 | AUCAGGAAAAAAUAUAUUAAAUGGC | 681 | GCCAUUUAAUAUAUUUUUUCCUGAUAA | 682 |
| 338 | AGGAAAAAAUAUAUUAAAUGGCUGA | 683 | UCAGCCAUUUAAUAUAUUUUUUCCUGA | 684 |
| 339 | GGAAAAAAUAUAUUAAAUGGCUGAT | 685 | AUCAGCCAUUUAAUAUAUUUUUUCCUG | 686 |
| 340 | GAAAAAAUAUAUUAAAUGGCUGATA | 687 | UAUCAGCCAUUUAAUAUAUUUUUUCCU | 688 |
| 341 | AAAAAAUAUAUUAAAUGGCUGAUAG | 689 | CUAUCAGCCAUUUAAUAUAUUUUUUCC | 690 |
| 342 | UAUUUUCUUUCUGCUUUUAAAAATT | 691 | AAUUUUUAAAAGCAGAAAGAAAAUACG | 692 |
| 343 | AUUUUCUUUCUGCUUUUAAAAAUTA | 693 | UAAUUUUUAAAAGCAGAAAGAAAAUAC | 694 |
| 344 | UCUUUCUGCUUUUAAAAAUUAUUCA | 695 | UGAAUAAUUUUUAAAAGCAGAAAGAAA | 696 |
| 345 | CUUUCUGCUUUUAAAAAUUAUUCAG | 697 | CUGAAUAAUUUUUAAAAGCAGAAAGAA | 698 |
| 346 | UUUCUGCUUUUAAAAAUUAUUCAGG | 699 | CCUGAAUAAUUUUUAAAAGCAGAAAGA | 700 |
| 347 | CUACUAAAAACACAAAAAUUAGCCA | 701 | UGGCUAAUUUUUGUGUUUUUAGUAGAG | 702 |
| 348 | CAAGAUAAGGAAAUCAGGAAGUGTA | 703 | UACACUUCCUGAUUUCCUUAUCUUGAU | 704 |
| 349 | AAGAUAAGGAAAUCAGGAAGUGUAA | 705 | UUACACUUCCUGAUUUCCUUAUCUUGA | 706 |
| 350 | AGAUAAGGAAAUCAGGAAGUGUAAT | 707 | AUUACACUUCCUGAUUUCCUUAUCUUG | 708 |
| 351 | GAUAAGGAAAUCAGGAAGUGUAATA | 709 | UAUUACACUUCCUGAUUUCCUUAUCUU | 710 |
| 352 | AUAAGGAAAUCAGGAAGUGUAAUAT | 711 | AUAUUACACUUCCUGAUUUCCUUAUCU | 712 |
| 353 | UAAGGAAAUCAGGAAGUGUAAUATT | 713 | AAUAUUACACUUCCUGAUUUCCUUAUC | 714 |
| 354 | AAGGAAAUCAGGAAGUGUAAUAUTC | 715 | GAAUAUUACACUUCCUGAUUUCCUUAU | 716 |
| 355 | AGGAAAUCAGGAAGUGUAAUAUUCT | 717 | AGAAUAUUACACUUCCUGAUUUCCUUA | 718 |
| 356 | GGAAAUCAGGAAGUGUAAUAUUCTT | 719 | AAGAAUAUUACACUUCCUGAUUUCCUU | 720 |
| 357 | GAAAUCAGGAAGUGUAAUAUUCUTA | 721 | UAAGAAUAUUACACUUCCUGAUUUCCU | 722 |
| 358 | CUAUGAAUGCAUUCUUAUUUCUUCT | 723 | AGAAGAAAUAAGAAUGCAUUCAUAGGC | 724 |
| 359 | UAUGAAUGCAUUCUUAUUUCUUCTT | 725 | AAGAAGAAAUAAGAAUGCAUUCAUAGG | 726 |
| 360 | CUACCACACCCAGCUAGUUUUUUTT | 727 | AAAAAAAACUAGCUGGGUGUGGUAGUG | 728 |
| 361 | CCACACCCAGCUAGUUUUUUUUUGT | 729 | ACAAAAAAAAACUAGCUGGGUGUGGUA | 730 |
| 362 | CACACCCAGCUAGUUUUUUUUUGTA | 731 | UACAAAAAAAAACUAGCUGGGUGUGGU | 732 |
| 363 | GCUAGGAUUACAGGUGUGAGCUACC | 733 | GGUAGCUCACACCUGUAAUCCUAGCAC | 734 |
| 364 | CUAGGAUUACAGGUGUGAGCUACCA | 735 | UGGUAGCUCACACCUGUAAUCCUAGCA | 736 |
| 365 | CCAUGCCUGGUCCAACAUUCUUCAT | 737 | AUGAAGAAUGUUGGACCAGGCAUGGUA | 738 |
| 366 | UGCAGAGUAUGAGCCUGAUUUUGTT | 739 | AACAAAAUCAGGCUCAUACUCUGCACU | 740 |
| 367 | GCAGAGUAUGAGCCUGAUUUUGUTT | 741 | AAACAAAAUCAGGCUCAUACUCUGCAC | 742 |
| 368 | CAGAGUAUGAGCCUGAUUUUGUUTA | 743 | UAAACAAAAUCAGGCUCAUACUCUGCA | 744 |
| 369 | AGAGUAUGAGCCUGAUUUUGUUUAA | 745 | UUAAACAAAAUCAGGCUCAUACUCUGC | 746 |
| 370 | GAGUAUGAGCCUGAUUUUGUUUAAA | 747 | UUUAAACAAAAUCAGGCUCAUACUCUG | 748 |
| 371 | GGGUGAAACCCCAUCUCUACUAAAA | 749 | UUUUAGUAGAGAUGGGGUUUCACCCAG | 750 |
| 372 | GUGAAACCCCAUCUCUACUAAAAAA | 751 | UUUUUUAGUAGAGAUGGGGUUUCACCC | 752 |
| 373 | UGAAACCCCAUCUCUACUAAAAAAT | 753 | AUUUUUUAGUAGAGAUGGGGUUUCACC | 754 |
| 374 | GAAACCCCAUCUCUACUAAAAAATG | 755 | CAUUUUUUAGUAGAGAUGGGGUUUCAC | 756 |
| 375 | AAACCCCAUCUCUACUAAAAAAUGC | 757 | GCAUUUUUUAGUAGAGAUGGGGUUUCA | 758 |
| 376 | AACCCCAUCUCUACUAAAAAAUGCA | 759 | UGCAUUUUUUAGUAGAGAUGGGGUUUC | 760 |
| 377 | CCCAUCUCUACUAAAAAAUGCAAAA | 761 | UUUUGCAUUUUUUAGUAGAGAUGGGGU | 762 |
| 378 | AUCAAAACCCUUAUGGCAGACUGTT | 763 | AACAGUCUGCCAUAAGGGUUUUGAUAU | 764 |
| 379 | UAUUUUAUUUGUCGUGCUUAUAUGT | 765 | ACAUAUAAGCACGACAAAUAAAAUACA | 766 |
| 380 | GUGUUGCCCAAGUUUCUAUGGUGAA | 767 | UUCACCAUAGAAACUUGGGCAACACAU | 768 |
| 381 | GCCCAAGUUUCUAUGGUGAACGGTA | 769 | UACCGUUCACCAUAGAAACUUGGGCAA | 770 |
| 382 | CCCAAGUUUCUAUGGUGAACGGUAT | 771 | AUACCGUUCACCAUAGAAACUUGGGCA | 772 |
| 383 | ACUUUCAGCAUGAGAAAAUAACUCC | 773 | GGAGUUAUUUUCUCAUGCUGAAAGUGA | 774 |
| 384 | CUUUCAGCAUGAGAAAAUAACUCCT | 775 | AGGAGUUAUUUUCUCAUGCUGAAAGUG | 776 |

[0228] In vitro cell-based assays: The ability of each of the 384 DsiRNAs listed in Table 1 to inhibit PNPLA3 expression is determined using in vitro cell-based assays. Further, the nucleotide sequences for the passenger strand and guide strand of the DsiRNAs have a distinct pattern of modified nucleotides and phosphorothioate linkages (see, e.g., FIG. 2). Briefly, HuH-7 human liver cells stably expressing PNPLA3 are transfected with each of the DsiRNAs (0.5 nM) in separate wells of a multi-well cell culture plate. Cells are maintained for 24 hr. following transfection, and then levels of remaining PNPLA3 mRNA from the transfected cells are determined using TAQMAN®-based qPCR assays. Two qPCR assays, a 3′ assay and a 5′ assay, are used to determine mRNA levels as measured by HEX and FAM probes, respectively.

[0229] The results of the HuH-7 cell-based assay with the DsiRNAs are shown in Table 2. Table 2 shows the results of the HuH-7 cell-based assay with 384 DsiRNAs that have guide strands that are complementary to human and monkey PNPLA3 mRNA (“double-common”). Transfection of a double-common DsiRNA that results in less than or equal to 30% PNPLA3 mRNA remaining in the cells when compared to negative controls is considered a candidate PNPLA3 expression inhibitor (referred to herein as a “hit”).

TABLE 2
Double-Common DsiRNA PNPLA3 Knockdown in HuH-7 Cells, 0.5 nM 24 hr-5′
and -3′ Assays % mRNA Remaining (normalized to HPRT1 and SFRS9 vs Mock Control).

| | PNPLA3-F495 | | PNPLA3-F595 | | Averages | |
|---|---|---|---|---|---|---|
| | % | % | % | % | Average % | Average |
| DsiRNA | Remaining | SEM | Remaining | SEM | Remaining | % SEM |
| 1 | — | — | 41.276 | 5.253 | 41.2760 | 5.2530 |
| 2 | 24.048 | 5.091 | 33.293 | 8.521 | 28.6705 | 6.8060 |
| 3 | 23.686 | 3.496 | 36.027 | 2.441 | 29.8565 | 2.9685 |
| 4 | 20.851 | 2.728 | 31.34 | 4.013 | 26.0955 | 3.3705 |
| 5 | 19.609 | 4.442 | 30.014 | 4.678 | 24.8115 | 4.5600 |
| 6 | 17.737 | 2.25 | 38.518 | 5.495 | 28.1275 | 3.8725 |
| 7 | 42.296 | 6.654 | — | — | 42.2960 | 6.6540 |
| 8 | 30.019 | 2.843 | 35.275 | 5.401 | 32.6470 | 4.1220 |
| 9 | 107.259 | 15.824 | 77.986 | 22.381 | 92.6225 | 19.1025 |
| 10 | 69.476 | 36.895 | 83.554 | 28.116 | 76.5150 | 32.5055 |
| 11 | 39.447 | 10.162 | 31.949 | 3.604 | 35.6980 | 6.8830 |
| 12 | — | — | 31.418 | 19.31 | 31.4180 | 19.3100 |
| 13 | 82.71 | 31.376 | 81.104 | 20.936 | 81.9070 | 26.1560 |
| 14 | 35.657 | 4.964 | 54.326 | 6.388 | 44.9915 | 5.6760 |
| 15 | 32.849 | 4.61 | 28.693 | 2.08 | 30.7710 | 3.3450 |
| 16 | — | — | — | — | — | — |
| 17 | — | — | 38.503 | 11.845 | 38.5030 | 11.8450 |
| 18 | 35.771 | 6.677 | 53.554 | 4.637 | 44.6625 | 5.6570 |
| 19 | 13.754 | 5.708 | 23.172 | 6.037 | 18.4630 | 5.8725 |
| 20 | 30.11 | 15.649 | 40.907 | 11.249 | 35.5085 | 13.4490 |
| 21 | 29.368 | 4.354 | 51.409 | 11.578 | 40.3885 | 7.9660 |
| 22 | 55.824 | 19.324 | 56.734 | 15.375 | 56.2790 | 17.3495 |
| 23 | 27.853 | 4.585 | 30.09 | 5.153 | 28.9715 | 4.8690 |
| 24 | 38.262 | 20.656 | 42.106 | 12.679 | 40.1840 | 16.6675 |
| 25 | 27.359 | 2.988 | 33.97 | 4.654 | 30.6645 | 3.8210 |
| 26 | 34.444 | 22.868 | 75.891 | 39.63 | 55.1675 | 31.2490 |
| 27 | 52.207 | 13.773 | 37.602 | 4.715 | 44.9045 | 9.2440 |
| 28 | 27.654 | 4.589 | 26.822 | 3.115 | 27.2380 | 3.8520 |
| 29 | 40.199 | 5.272 | 35.055 | 4.257 | 37.6270 | 4.7645 |
| 30 | 27.071 | 6.617 | 27.672 | 4.172 | 27.3715 | 5.3945 |
| 31 | 26.453 | 4.251 | 31.149 | 2.751 | 28.8010 | 3.5010 |
| 32 | 44.932 | 8.656 | 32.93 | 3.5 | 38.9310 | 6.0780 |
| 33 | 97.873 | 67.085 | 132.571 | 104.973 | 115.2220 | 86.0290 |
| 34 | 27.054 | 5.653 | 44.814 | 11.339 | 35.9340 | 8.4960 |
| 35 | 178.389 | 145.305 | 220.361 | 218.004 | 199.3750 | 181.6545 |
| 36 | 22.973 | 7.112 | 39.55 | 6.188 | 31.2615 | 6.6500 |
| 37 | 32.844 | 4.1 | 40.917 | 5.782 | 36.8805 | 4.9410 |
| 38 | 36.642 | 13.921 | 34.387 | 13.321 | 35.5145 | 13.6210 |
| 39 | 43.801 | 18.504 | 54.98 | 32.264 | 49.3905 | 25.3840 |
| 40 | 38.178 | 18.519 | 103.356 | 40.968 | 70.7670 | 29.7435 |
| 41 | 33.309 | 13.99 | 36.814 | 10.58 | 35.0615 | 12.2850 |
| 42 | 25.27 | 4.156 | 26.624 | 4.591 | 25.9470 | 4.3735 |
| 43 | 22.02 | 2.478 | 39.928 | 6.08 | 30.9740 | 4.2790 |
| 44 | 19.086 | 1.83 | 28.238 | 2.134 | 23.6620 | 1.9820 |
| 45 | 60.907 | 30.543 | 77.064 | 28.815 | 68.9855 | 29.6790 |
| 46 | 32.715 | 4.298 | 45.502 | 4.177 | 39.1085 | 4.2375 |
| 47 | 32.36 | 7.13 | 50.54 | 6.722 | 41.4500 | 6.9260 |
| 48 | 28.239 | 8.334 | 52.43 | 10.568 | 40.3345 | 9.4510 |
| 49 | 49.22 | 7.374 | 44.676 | 7.588 | 46.9480 | 7.4810 |
| 50 | 64.843 | 20.454 | 53.307 | 13.88 | 59.0750 | 17.1670 |
| 51 | 31.516 | 10.842 | 28.143 | 3.648 | 29.8295 | 7.2450 |
| 52 | 38.404 | 7.542 | 29.373 | 4.595 | 33.8885 | 6.0685 |
| 53 | 55.094 | 5.175 | 65.67 | 8.678 | 60.3820 | 6.9265 |
| 54 | 56.104 | 4.672 | 48.547 | 3.664 | 52.3255 | 4.1680 |
| 55 | 78.803 | 6.549 | 50.57 | 4.167 | 64.6865 | 5.3580 |
| 56 | 56.816 | 6.257 | 42.303 | 4.046 | 49.5595 | 5.1515 |
| 57 | 22.321 | 1.477 | 24.024 | 1.797 | 23.1725 | 1.6370 |
| 58 | 42.104 | 8.901 | 86.02 | 10.205 | 64.0620 | 9.5530 |
| 59 | 37.617 | 4.933 | 41.69 | 3.548 | 39.6535 | 4.2405 |
| 60 | 49.219 | 7.084 | 45.388 | 4.609 | 47.3035 | 5.8465 |
| 61 | 28.515 | 4.427 | 34.695 | 4.696 | 31.6050 | 4.5615 |
| 62 | 24.048 | 2.942 | 27.275 | 2.209 | 25.6615 | 2.5755 |
| 63 | 33.399 | 2.377 | 34.226 | 3.995 | 33.8125 | 3.1860 |
| 64 | 17.981 | 2.846 | 34.171 | 6.769 | 26.0760 | 4.8075 |
| 65 | 27.426 | 1.916 | 31.928 | 4.955 | 29.6770 | 3.4355 |
| 66 | 26.094 | 3.248 | 23.97 | 3.488 | 25.0320 | 3.3680 |
| 67 | 21.158 | 2.466 | 24.938 | 2.599 | 23.0480 | 2.5325 |
| 68 | 35.62 | 4.572 | 34.261 | 2.97 | 34.9405 | 3.7710 |
| 69 | 21.882 | 3.332 | 33.373 | 3.622 | 27.6275 | 3.4770 |
| 70 | 40.405 | 4.812 | 42.552 | 4.601 | 41.4785 | 4.7065 |
| 71 | 22.1 | 2.422 | 34.351 | 2.553 | 28.2255 | 2.4875 |
| 72 | 33.555 | 4.796 | 36.455 | 3.012 | 35.0050 | 3.9040 |
| 73 | 25.822 | 3.189 | 34.328 | 2.337 | 30.0750 | 2.7630 |
| 74 | 35.156 | 8.593 | 42.12 | 6.588 | 38.6380 | 7.5905 |
| 75 | 30.278 | 2.948 | 39.251 | 2.5 | 34.7645 | 2.7240 |
| 76 | 54.252 | 11.633 | 55.948 | 7.739 | 55.1000 | 9.6860 |
| 77 | 32.7 | 2.948 | 32.575 | 2.223 | 32.6375 | 2.5855 |
| 78 | 47.513 | 9.443 | 41.285 | 5.205 | 44.3990 | 7.3240 |
| 79 | 27.208 | 6.712 | 30.186 | 2.302 | 28.6970 | 4.5070 |
| 80 | 41.53 | 8.596 | 40.294 | 7.195 | 40.9120 | 7.8955 |
| 81 | 24.351 | 5.957 | 30.338 | 1.908 | 27.3445 | 3.9325 |
| 82 | 32.801 | 2.291 | 36.67 | 2.213 | 34.7355 | 2.2520 |
| 83 | 24.892 | 2.701 | 31.062 | 3.006 | 27.9770 | 2.8535 |
| 84 | 37.631 | 5.376 | 33.714 | 3.496 | 35.6725 | 4.4360 |
| 85 | 36.987 | 1.676 | 39.783 | 1.568 | 38.3850 | 1.6220 |
| 86 | 54.723 | 3.207 | 55.297 | 3.214 | 55.0100 | 3.2105 |
| 87 | 77.564 | 4.28 | 69.537 | 3.448 | 73.5505 | 3.8640 |
| 88 | 52.849 | 5.817 | 56.297 | 6.566 | 54.5730 | 6.1915 |
| 89 | 26.699 | 2.653 | 41.509 | 3.837 | 34.1040 | 3.2450 |
| 90 | 30.182 | 4.019 | 42.498 | 2.662 | 36.3400 | 3.3405 |
| 91 | 25.266 | 4.57 | 27.045 | 2.857 | 26.1555 | 3.7135 |
| 92 | 26.577 | 3.612 | 30.034 | 2.501 | 28.3055 | 3.0565 |
| 93 | 26.538 | 2.286 | 34 | 2.564 | 30.2690 | 2.4250 |
| 94 | 48.767 | 5.695 | 30.921 | 2.911 | 39.8440 | 4.3030 |
| 95 | 30.369 | 4.104 | 32.567 | 4.019 | 31.4680 | 4.0615 |
| 96 | 33.205 | 8.907 | 38.475 | 5.665 | 35.8400 | 7.2860 |
| 97 | 14.726 | 1.561 | 11.303 | 0.555 | 13.0145 | 1.0580 |
| 98 | 22.478 | 4.813 | 16.728 | 2.957 | 19.6030 | 3.8850 |
| 99 | 18.627 | 2.295 | 16.015 | 1.822 | 17.3210 | 2.0585 |
| 100 | 13.055 | 2.262 | 11.896 | 1.013 | 12.4755 | 1.6375 |
| 101 | 15.753 | 2.573 | 11.243 | 0.971 | 13.4980 | 1.7720 |
| 102 | 24.287 | 1.728 | 15.82 | 0.749 | 20.0535 | 1.2385 |
| 103 | 17.645 | 3.371 | 10.338 | 1.306 | 13.9915 | 2.3385 |
| 104 | 22.114 | 6.098 | 12.625 | 2.184 | 17.3695 | 4.1410 |
| 105 | 33.791 | 5.469 | 18.178 | 2.526 | 25.9845 | 3.9975 |
| 106 | 34.826 | 4.934 | 16.945 | 1.304 | 25.8855 | 3.1190 |
| 107 | 25.682 | 1.01 | 13.707 | 0.505 | 19.6945 | 0.7575 |
| 108 | 23.086 | 1.758 | 12.884 | 1.012 | 17.9850 | 1.3850 |
| 109 | 20.041 | 3.132 | 10.126 | 1.13 | 15.0835 | 2.1310 |
| 110 | 28.606 | 2.003 | 13.448 | 0.804 | 21.0270 | 1.4035 |
| 111 | 43.662 | 4.981 | 20.448 | 1.281 | 32.0550 | 3.1310 |
| 112 | 20.181 | 1.863 | 12.302 | 1.629 | 16.2415 | 1.7460 |
| 113 | 20.934 | 6.186 | 15.977 | 2.091 | 18.4555 | 4.1385 |
| 114 | 38.491 | 7.949 | 23.525 | 4.479 | 31.0080 | 6.2140 |
| 115 | 21.566 | 1.511 | 14.963 | 0.928 | 18.2645 | 1.2195 |
| 116 | 18.051 | 1.808 | 11.863 | 1.114 | 14.9570 | 1.4610 |
| 117 | 15.962 | 2.707 | 11.739 | 0.976 | 13.8505 | 1.8415 |
| 118 | 37.771 | 4.761 | 25.737 | 2.365 | 31.7540 | 3.5630 |
| 119 | 47.032 | 11.179 | 22.511 | 4.506 | 34.7715 | 7.8425 |
| 120 | 66.607 | 3.571 | 32.035 | 2.004 | 49.3210 | 2.7875 |
| 121 | 35.025 | 9.645 | 15.594 | 4.295 | 25.3095 | 6.9700 |
| 122 | 33.49 | 9.414 | 14.094 | 2.996 | 23.7920 | 6.2050 |
| 123 | 27.725 | 6.288 | 15.172 | 2.581 | 21.4485 | 4.4345 |
| 124 | 29.415 | 3.434 | 10.892 | 1.452 | 20.1535 | 2.4430 |
| 125 | 21.307 | 2.786 | 12.129 | 1.254 | 16.7180 | 2.0200 |
| 126 | 26.243 | 4.681 | 8.668 | 1.375 | 17.4555 | 3.0280 |
| 127 | 27.085 | 4.693 | 10.576 | 1.527 | 18.8305 | 3.1100 |
| 128 | 20.768 | 4.12 | 12.92 | 2.463 | 16.8440 | 3.2915 |
| 129 | 18.319 | 1.349 | 13.094 | 1.028 | 15.7065 | 1.1885 |
| 130 | 28.795 | 2.276 | 15.029 | 1.164 | 21.9120 | 1.7200 |
| 131 | 17.799 | 2.265 | 12.145 | 0.808 | 14.9720 | 1.5365 |
| 132 | 27.693 | 7.219 | 12.343 | 1.574 | 20.0180 | 4.3965 |
| 133 | 24.005 | 2.76 | 13.061 | 0.765 | 18.5330 | 1.7625 |
| 134 | 21.903 | 3.009 | 11.031 | 1.763 | 16.4670 | 2.3860 |
| 135 | 14.058 | 1.645 | 10.457 | 1.234 | 12.2575 | 1.4395 |
| 136 | 15.21 | 4.068 | 12.22 | 0.846 | 13.7150 | 2.4570 |
| 137 | 21.482 | 3.191 | 15.113 | 1.482 | 18.2975 | 2.3365 |
| 138 | 24.386 | 4.677 | 13.694 | 1.354 | 19.0400 | 3.0155 |
| 139 | 26.608 | 4.511 | 17.112 | 1.574 | 21.8600 | 3.0425 |
| 140 | 32.503 | 3.692 | 20.895 | 3.738 | 26.6990 | 3.7150 |
| 141 | 23.794 | 1.508 | 16.334 | 1.555 | 20.0640 | 1.5315 |
| 142 | 31.213 | 7.279 | 15.566 | 3.053 | 23.3895 | 5.1660 |
| 143 | 27.265 | 4.596 | 18.117 | 2.525 | 22.6910 | 3.5605 |
| 144 | 36.408 | 5.816 | 22.612 | 3.627 | 29.5100 | 4.7215 |
| 145 | 57.79 | 8.838 | 24.119 | 3.876 | 40.9545 | 6.3570 |
| 146 | 49.794 | 6.232 | 59.38 | 7.58 | 54.5870 | 6.9060 |
| 147 | 47.063 | 10.454 | 33.805 | 4.167 | 40.4340 | 7.3105 |
| 148 | 37.932 | 3.753 | 30.31 | 3.198 | 34.1210 | 3.4755 |
| 149 | 61.573 | 12.448 | 30.541 | 3.873 | 46.0570 | 8.1605 |
| 150 | 58.524 | 6.231 | 39.629 | 3.33 | 49.0765 | 4.7805 |
| 151 | 43.03 | 4.916 | 21.046 | 2.885 | 32.0380 | 3.9005 |
| 152 | 44.872 | 8.77 | 21.007 | 2.636 | 32.9395 | 5.7030 |
| 153 | 40.396 | 5.688 | 22.825 | 2.132 | 31.6105 | 3.9100 |
| 154 | 65.539 | 13.255 | 45.417 | 6.461 | 55.4780 | 9.8580 |
| 155 | 48.703 | 9.937 | 31.374 | 2.867 | 40.0385 | 6.4020 |
| 156 | 37.181 | 4.937 | 29.617 | 2.937 | 33.3990 | 3.9370 |
| 157 | 35.186 | 4.535 | 17.878 | 1.581 | 26.5320 | 3.0580 |
| 158 | 51.661 | 2.695 | 33.002 | 1.991 | 42.3315 | 2.3430 |
| 159 | 30.77 | 4.109 | 19.233 | 1.542 | 25.0015 | 2.8255 |
| 160 | 36.094 | 3.542 | 17.974 | 1.657 | 27.0340 | 2.5995 |
| 161 | 35.409 | 2.366 | 33.483 | 2.737 | 34.4460 | 2.5515 |
| 162 | 33.433 | 2.074 | 26.398 | 3.543 | 29.9155 | 2.8085 |
| 163 | 42.491 | 4.39 | 22.276 | 1.604 | 32.3835 | 2.9970 |
| 164 | 33.078 | 3.228 | 32.84 | 3.386 | 32.9590 | 3.3070 |
| 165 | 45.275 | 3.204 | 39.092 | 3.755 | 42.1835 | 3.4795 |
| 166 | 29.602 | 1.738 | 24.219 | 1.898 | 26.9105 | 1.8180 |
| 167 | 27.784 | 3.443 | 22.843 | 1.792 | 25.3135 | 2.6175 |
| 168 | 74.683 | 10.617 | 49.732 | 3.286 | 62.2075 | 6.9515 |
| 169 | 48.336 | 4.662 | 44.463 | 3.058 | 46.3995 | 3.8600 |
| 170 | 50.128 | 9.574 | 41.486 | 4.115 | 45.8070 | 6.8445 |
| 171 | 47.25 | 9.041 | 37.456 | 4.455 | 42.3530 | 6.7480 |
| 172 | 53.153 | 7.175 | 30.582 | 6.503 | 41.8675 | 6.8390 |
| 173 | 39.084 | 6.244 | 25.727 | 2.191 | 32.4055 | 4.2175 |
| 174 | 45.005 | 1.875 | 33.581 | 2.379 | 39.2930 | 2.1270 |
| 175 | 47.646 | 6.625 | 26.629 | 4.836 | 37.1375 | 5.7305 |
| 176 | 55.395 | 7.326 | 34.511 | 6.658 | 44.9530 | 6.9920 |
| 177 | 33.771 | 3.981 | 34.434 | 3.484 | 34.1025 | 3.7325 |
| 178 | 67.077 | 10.657 | 56.357 | 7.847 | 61.7170 | 9.2520 |
| 179 | 35.008 | 4.54 | 28.283 | 2.932 | 31.6455 | 3.7360 |
| 180 | 42.068 | 3.42 | 28.527 | 1.676 | 35.2975 | 2.5480 |
| 181 | 40.143 | 2.884 | 23.643 | 3.134 | 31.8930 | 3.0090 |
| 182 | 55.98 | 12.403 | 27.675 | 2.591 | 41.8275 | 7.4970 |
| 183 | 45.856 | 4.074 | 26.554 | 3.411 | 36.2050 | 3.7425 |
| 184 | 47.638 | 13.905 | 23.569 | 4.462 | 35.6035 | 9.1835 |
| 185 | 29.627 | 2.072 | 28.727 | 2.788 | 29.1770 | 2.4300 |
| 186 | 25.87 | 1.617 | 24.308 | 1.641 | 25.0890 | 1.6290 |
| 187 | 28.469 | 3.789 | 28.409 | 2.228 | 28.4390 | 3.0085 |
| 188 | 43.256 | 3.532 | 29.637 | 1.678 | 36.4465 | 2.6050 |
| 189 | 35.294 | 2.99 | 26.036 | 1.809 | 30.6650 | 2.3995 |
| 190 | 41.63 | 3.818 | 31.807 | 1.941 | 36.7185 | 2.8795 |
| 191 | 33.432 | 2.727 | 26.418 | 1.23 | 29.9250 | 1.9785 |
| 192 | 38.533 | 3.055 | 26.167 | 2.676 | 32.3500 | 2.8655 |
| 193 | 52.145 | 7.633 | 66.647 | 7.649 | 59.3960 | 7.6410 |
| 194 | 78.674 | 19.973 | 77.211 | 18.407 | 77.9425 | 19.1900 |
| 195 | 61.3 | 14.568 | 47.323 | 8.818 | 54.3115 | 11.6930 |
| 196 | 82.319 | 28.729 | 49.804 | 10.153 | 66.0615 | 19.4410 |
| 197 | 47.078 | 7.783 | 46.383 | 6.365 | 46.7305 | 7.0740 |
| 198 | 43.554 | 13.721 | 39.919 | 8.064 | 41.7365 | 10.8925 |
| 199 | 40.89 | 12.488 | 44.564 | 5.499 | 42.7270 | 8.9935 |
| 200 | 46.423 | 6.179 | 34.111 | 2.888 | 40.2670 | 4.5335 |
| 201 | 44.093 | 8.793 | 52.982 | 7.827 | 48.5375 | 8.3100 |
| 202 | 51.569 | 12.11 | 47.774 | 10.111 | 49.6715 | 11.1105 |
| 203 | 39.021 | 4.874 | 51.153 | 5.821 | 45.0870 | 5.3475 |
| 204 | 52.055 | 9.223 | 31.552 | 3.951 | 41.8035 | 6.5870 |
| 205 | 41.044 | 5.775 | 34.923 | 3.705 | 37.9835 | 4.7400 |
| 206 | 31.351 | 3.687 | 32.129 | 2.472 | 31.7400 | 3.0795 |
| 207 | 43.82 | 4.633 | 28.098 | 1.853 | 35.9590 | 3.2430 |
| 208 | 36.337 | 6.743 | 29.077 | 3.006 | 32.7070 | 4.8745 |
| 209 | 36.945 | 7.059 | 29.934 | 3.642 | 33.4395 | 5.3505 |
| 210 | 37.592 | 3.376 | 37.793 | 2.909 | 37.6925 | 3.1425 |
| 211 | 36.686 | 3.72 | 35.615 | 3.93 | 36.1505 | 3.8250 |
| 212 | 36.654 | 4.758 | 32.036 | 2.656 | 34.3450 | 3.7070 |
| 213 | 42.177 | 6.122 | 31.067 | 4.128 | 36.6220 | 5.1250 |
| 214 | 37.527 | 8.471 | 32.699 | 4.645 | 35.1130 | 6.5580 |
| 215 | 37.302 | 6.865 | 29.908 | 3.386 | 33.6050 | 5.1255 |
| 216 | 39.019 | 8.467 | 28.36 | 2.817 | 33.6895 | 5.6420 |
| 217 | 53.521 | 13.053 | 25.512 | 3.686 | 39.5165 | 8.3695 |
| 218 | 41.043 | 11.011 | 27.355 | 5.791 | 34.1990 | 8.4010 |
| 219 | 51.988 | 10.693 | 31.329 | 3.319 | 41.6585 | 7.0060 |
| 220 | 54.023 | 6.301 | 41.112 | 4.76 | 47.5675 | 5.5305 |
| 221 | 58.76 | 6.462 | 39.758 | 2.97 | 49.2590 | 4.7160 |
| 222 | 236.787 | 43.566 | 243.617 | 53.774 | 240.2020 | 48.6700 |
| 223 | 61.825 | 6.104 | 39.095 | 4.733 | 50.4600 | 5.4185 |
| 224 | 60.335 | 8.345 | 42.762 | 5.15 | 51.5485 | 6.7475 |
| 225 | 42.422 | 4.628 | 33.442 | 3.115 | 37.9320 | 3.8715 |
| 226 | 48.764 | 5.455 | 26.922 | 2.335 | 37.8430 | 3.8950 |
| 227 | 57.581 | 7.579 | 42.222 | 4.06 | 49.9015 | 5.8195 |
| 228 | 46.242 | 5.713 | 32.37 | 2.362 | 39.3060 | 4.0375 |
| 229 | 59.85 | 6.227 | 37.452 | 3.019 | 48.6510 | 4.6230 |
| 230 | 42.275 | 3.602 | 32.725 | 2.969 | 37.5000 | 3.2855 |
| 231 | 54.799 | 3.621 | 33.443 | 2.238 | 44.1210 | 2.9295 |
| 232 | 52.778 | 5.345 | 35.823 | 3.952 | 44.3005 | 4.6485 |
| 233 | 54.107 | 6.101 | 33.629 | 3.781 | 43.8680 | 4.9410 |
| 234 | 57.658 | 5.363 | 42.349 | 3.414 | 50.0035 | 4.3885 |
| 235 | 39.81 | 6.669 | 29.299 | 2.818 | 34.5545 | 4.7435 |
| 236 | 49.078 | 4.885 | 31.99 | 2.007 | 40.5340 | 3.4460 |
| 237 | 57.23 | 6.733 | 36.45 | 3.148 | 46.8400 | 4.9405 |
| 238 | 51.689 | 4.587 | 33.588 | 2.816 | 42.6385 | 3.7015 |
| 239 | 44.895 | 5.883 | 33.621 | 3.034 | 39.2580 | 4.4585 |
| 240 | 59.327 | 4.174 | 43.637 | 4.972 | 51.4820 | 4.5730 |
| 241 | 63.766 | 13.264 | 50.677 | 5.209 | 57.2215 | 9.2365 |
| 242 | 66.835 | 12.5 | 52.004 | 7.592 | 59.4195 | 10.0460 |
| 243 | 54.29 | 6.239 | 38.992 | 4.219 | 46.6410 | 5.2290 |
| 244 | 72.508 | 13.528 | 36.851 | 5.599 | 54.6795 | 9.5635 |
| 245 | 65.646 | 9.098 | 55.163 | 6.389 | 60.4045 | 7.7435 |
| 246 | 51.051 | 6.557 | 46.828 | 6.46 | 48.9395 | 6.5085 |
| 247 | 60.801 | 6.585 | 41.571 | 5.728 | 51.1860 | 6.1565 |
| 248 | 50.195 | 6.174 | 39.365 | 4.661 | 44.7800 | 5.4175 |
| 249 | 37.378 | 5.543 | 42.906 | 6.632 | 40.1420 | 6.0875 |
| 250 | 43.321 | 5.067 | 30.966 | 3.133 | 37.1435 | 4.1000 |
| 251 | 45.472 | 4.875 | 32.346 | 3.885 | 38.9090 | 4.3800 |
| 252 | 43.062 | 3.621 | 28.848 | 2.106 | 35.9550 | 2.8635 |
| 253 | 37.701 | 3.518 | 25.509 | 2.268 | 31.6050 | 2.8930 |
| 254 | 58.2 | 18.808 | 36.005 | 9.635 | 47.1025 | 14.2215 |
| 255 | 31.77 | 3.926 | 27.901 | 4.411 | 29.8355 | 4.1685 |
| 256 | 38.708 | 3.847 | 36.377 | 3.262 | 37.5425 | 3.5545 |
| 257 | 30.508 | 3.645 | 31.26 | 2.622 | 30.8840 | 3.1335 |
| 258 | 44.359 | 5 | 34.497 | 2.636 | 39.4280 | 3.8180 |
| 259 | 67.139 | 7.485 | 40.465 | 2.943 | 53.8020 | 5.2140 |
| 260 | 66.589 | 6.837 | 39.106 | 3.29 | 52.8475 | 5.0635 |
| 261 | 48.322 | 10.679 | 26.008 | 2.39 | 37.1650 | 6.5345 |
| 262 | 50.546 | 4.737 | 32.219 | 2.427 | 41.3825 | 3.5820 |
| 263 | 59.307 | 7.82 | 29.231 | 2.967 | 44.2690 | 5.3935 |
| 264 | 97.302 | 11.857 | 53.08 | 6.094 | 75.1910 | 8.9755 |
| 265 | 76.539 | 14.949 | 85.905 | 13.021 | 81.2220 | 13.9850 |
| 266 | 57.905 | 6.615 | 64.596 | 7.651 | 61.2505 | 7.1330 |
| 267 | 69.77 | 6.607 | 53.074 | 4.276 | 61.4220 | 5.4415 |
| 268 | 48.668 | 10.684 | 40.916 | 5.466 | 44.7920 | 8.0750 |
| 269 | 47.46 | 7.531 | 42.844 | 4.1 | 45.1520 | 5.8155 |
| 270 | 70.579 | 11.73 | 61.976 | 6.502 | 66.2775 | 9.1160 |
| 271 | 115.007 | 12.121 | 67.306 | 4.174 | 91.1565 | 8.1475 |
| 272 | 82.348 | 12.571 | 104.237 | 16.188 | 93.2925 | 14.3795 |
| 273 | 72.215 | 14.678 | 53.943 | 7.425 | 63.0790 | 11.0515 |
| 274 | 49.167 | 8.023 | 49.69 | 6.118 | 49.4285 | 7.0705 |
| 275 | 41.439 | 3.584 | 29.44 | 2.996 | 35.4395 | 3.2900 |
| 276 | 53.402 | 8.54 | 50.701 | 3.872 | 52.0515 | 6.2060 |
| 277 | 56.148 | 3.835 | 32.342 | 3.153 | 44.2450 | 3.4940 |
| 278 | 67.762 | 15.057 | 45.771 | 7.974 | 56.7665 | 11.5155 |
| 279 | 53.393 | 3.781 | 31.896 | 2.753 | 42.6445 | 3.2670 |
| 280 | 62.738 | 14.71 | 39.414 | 4.46 | 51.0760 | 9.5850 |
| 281 | 40.384 | 8.034 | 38.263 | 3.196 | 39.3235 | 5.6150 |
| 282 | 40.763 | 5.446 | 40.712 | 4.898 | 40.7375 | 5.1720 |
| 283 | 46.465 | 10.212 | 46.647 | 6.183 | 46.5560 | 8.1975 |
| 284 | 38.536 | 4.547 | 41.452 | 2.836 | 39.9940 | 3.6915 |
| 285 | 42.301 | 4.416 | 43.768 | 4.259 | 43.0345 | 4.3375 |
| 286 | 46.313 | 8.357 | 38.798 | 5.187 | 42.5555 | 6.7720 |
| 287 | 50.769 | 6.505 | 43.597 | 4.509 | 47.1830 | 5.5070 |
| 288 | 38.562 | 8.297 | 37.896 | 4.33 | 38.2290 | 6.3135 |
| 289 | 97.407 | 9.944 | 84.032 | 7.979 | 90.7195 | 8.9615 |
| 290 | 96.276 | 16.596 | 80.344 | 14.757 | 88.3100 | 15.6765 |
| 291 | 97.306 | 19.495 | 65.589 | 6.382 | 81.4475 | 12.9385 |
| 292 | 55.475 | 9.264 | 45.599 | 8.096 | 50.5370 | 8.6800 |
| 293 | 62.494 | 8.981 | 44.842 | 6.356 | 53.6680 | 7.6685 |
| 294 | 64.097 | 10.104 | 45.876 | 4.721 | 54.9865 | 7.4125 |
| 295 | 54.142 | 14.352 | 44.557 | 6.065 | 49.3495 | 10.2085 |
| 296 | 45.915 | 5.238 | 42.595 | 4.868 | 44.2550 | 5.0530 |
| 297 | 52.489 | 10.839 | 40.88 | 3.707 | 46.6845 | 7.2730 |
| 298 | 63.515 | 15.058 | 48.368 | 7.137 | 55.9415 | 11.0975 |
| 299 | 68.855 | 5.952 | 39.142 | 4.218 | 53.9985 | 5.0850 |
| 300 | 41.279 | 2.923 | 42.539 | 2.744 | 41.9090 | 2.8335 |
| 301 | 61.222 | 5.21 | 35.294 | 2.489 | 48.2580 | 3.8495 |
| 302 | 61.31 | 7.946 | 54.541 | 6.669 | 57.9255 | 7.3075 |
| 303 | 72.478 | 6.439 | 34.292 | 3.108 | 53.3850 | 4.7735 |
| 304 | 67.572 | 16.336 | 42.125 | 6.87 | 54.8485 | 11.6030 |
| 305 | 50.921 | 8.983 | 33.358 | 4.008 | 42.1395 | 6.4955 |
| 306 | 57.53 | 5.6 | 69.86 | 6.547 | 63.6950 | 6.0735 |
| 307 | 64.026 | 11.056 | 39.867 | 4.008 | 51.9465 | 7.5320 |
| 308 | 49.409 | 3.059 | 42.979 | 2.509 | 46.1940 | 2.7840 |
| 309 | 54.897 | 4.814 | 31.307 | 1.962 | 43.1020 | 3.3880 |
| 310 | 41.554 | 2.628 | 37.128 | 1.841 | 39.3410 | 2.2345 |
| 311 | 51.666 | 8.47 | 40.257 | 4.367 | 45.9615 | 6.4185 |
| 312 | 49.509 | 6.575 | 28.02 | 4.538 | 38.7645 | 5.5565 |
| 313 | — | — | 194.826 | 68.134 | 194.8260 | 68.1340 |
| 314 | 121.989 | 16.822 | 138.651 | 21 | 130.3200 | 18.9110 |
| 315 | 80.309 | 31.932 | 61.6 | 21.185 | 70.9545 | 26.5585 |
| 316 | 92.927 | 25.688 | 67.475 | 19.158 | 80.2010 | 22.4230 |
| 317 | 90.794 | 26.314 | 68.783 | 17.49 | 79.7885 | 21.9020 |
| 318 | 78.946 | 5.722 | 89.051 | 5.366 | 83.9985 | 5.5440 |
| 319 | 78.528 | 22.516 | 68.248 | 14.662 | 73.3880 | 18.5890 |
| 320 | 88.504 | 27.66 | 74.364 | 17.313 | 81.4340 | 22.4865 |
| 321 | 80.819 | 11.586 | 72.082 | 9.362 | 76.4505 | 10.4740 |
| 322 | 66.905 | 11.106 | 59.407 | 7.519 | 63.1560 | 9.3125 |
| 323 | 56.665 | 7.201 | 65.996 | 7.423 | 61.3305 | 7.3120 |
| 324 | 58.472 | 14.789 | 52.989 | 6.283 | 55.7305 | 10.5360 |
| 325 | 73.835 | 10.27 | 45.629 | 3.865 | 59.7320 | 7.0675 |
| 326 | 83.653 | 12.949 | 55.705 | 5.376 | 69.6790 | 9.1625 |
| 327 | 48.135 | 5.765 | 47.686 | 2.973 | 47.9105 | 4.3690 |
| 328 | 58.846 | 13.768 | 64.173 | 8.7 | 61.5095 | 11.2340 |
| 329 | 46.418 | 3.234 | 43.86 | 4.767 | 45.1390 | 4.0005 |
| 330 | 48.925 | 5.8 | 47.32 | 5.483 | 48.1225 | 5.6415 |
| 331 | 60.81 | 13.53 | 36.129 | 3.04 | 48.4695 | 8.2850 |
| 332 | 56.142 | 10.276 | 41.861 | 5.196 | 49.0015 | 7.7360 |
| 333 | 57.072 | 5.485 | 46.44 | 1.828 | 51.7560 | 3.6565 |
| 334 | 57.031 | 14.153 | 47.644 | 5.986 | 52.3375 | 10.0695 |
| 335 | 63.616 | 8.355 | 62.766 | 7.336 | 63.1910 | 7.8455 |
| 336 | 61.994 | 10.795 | 49.157 | 4.36 | 55.5755 | 7.5775 |
| 337 | 109.966 | 11.513 | 73.307 | 11.438 | 91.6365 | 11.4755 |
| 338 | 110.715 | 15.908 | 92.237 | 13.006 | 101.4760 | 14.4570 |
| 339 | 75.364 | 14.03 | 67.654 | 10.63 | 71.5090 | 12.3300 |
| 340 | 109.658 | 7.631 | 67.114 | 6.374 | 88.3860 | 7.0025 |
| 341 | 81.366 | 8.105 | 61.479 | 4 | 71.4225 | 6.0525 |
| 342 | 64.415 | 15.53 | 79.511 | 24.66 | 71.9630 | 20.0950 |
| 343 | 74.24 | 10.057 | 46.431 | 5.731 | 60.3355 | 7.8940 |
| 344 | 86.963 | 13.807 | 54.298 | 8.525 | 70.6305 | 11.1660 |
| 345 | 71.074 | 6.207 | 57.396 | 6.551 | 64.2350 | 6.3790 |
| 346 | 91.626 | 10.114 | 74.902 | 8.206 | 83.2640 | 9.1600 |
| 347 | 77.149 | 8.202 | 53.758 | 5.371 | 65.4535 | 6.7865 |
| 348 | 80.631 | 9.944 | 56.546 | 8.401 | 68.5885 | 9.1725 |
| 349 | 60.505 | 5.38 | 37.207 | 4.379 | 48.8560 | 4.8795 |
| 350 | 64.783 | 11.132 | 46.827 | 8.602 | 55.8050 | 9.8670 |
| 351 | 70.732 | 7.768 | 42.967 | 3.442 | 56.8495 | 5.6050 |
| 352 | 85.716 | 13.405 | 56.756 | 5.896 | 71.2360 | 9.6505 |
| 353 | 49.942 | 6.657 | 49.317 | 3.253 | 49.6295 | 4.9550 |
| 354 | 38.757 | 3.56 | 37.798 | 2.633 | 38.2775 | 3.0965 |
| 355 | 45.029 | 2.934 | 38.812 | 2.665 | 41.9205 | 2.7995 |
| 356 | 38.688 | 3.896 | 34.3 | 2.617 | 36.4940 | 3.2565 |
| 357 | 52.918 | 9.736 | 35.223 | 3.54 | 44.0705 | 6.6380 |
| 358 | 52.294 | 3.336 | 44.793 | 5.552 | 48.5435 | 4.4440 |
| 359 | 53.158 | 3.096 | 41.327 | 3.233 | 47.2425 | 3.1645 |
| 360 | 103.51 | 27.753 | 62.923 | 11.824 | 83.2165 | 19.7885 |
| 361 | 122.759 | 25.999 | 106.083 | 13.134 | 114.4210 | 19.5665 |
| 362 | 106.559 | 19.744 | 101.161 | 14.303 | 103.8600 | 17.0235 |
| 363 | 109.834 | 19.943 | 79.727 | 14.271 | 94.7805 | 17.1070 |
| 364 | 102.297 | 10.688 | 78.932 | 9.566 | 90.6145 | 10.1270 |
| 365 | 82.014 | 8.363 | 73.591 | 5.609 | 77.8025 | 6.9860 |
| 366 | 67.391 | 23.514 | 69.264 | 11.51 | 68.3275 | 17.5120 |
| 367 | 95.165 | 15.862 | 42.233 | 5.102 | 68.6990 | 10.4820 |
| 368 | 95.977 | 20.567 | 51.602 | 9.654 | 73.7895 | 15.1105 |
| 369 | 65.153 | 14.652 | 46.363 | 7.328 | 55.7580 | 10.9900 |
| 370 | 58.571 | 7.578 | 50.496 | 6.145 | 54.5335 | 6.8615 |
| 371 | 84.037 | 13.739 | 52.431 | 5.879 | 68.2340 | 9.8090 |
| 372 | 67.564 | 8.585 | 48.839 | 4.307 | 58.2015 | 6.4460 |
| 373 | 57.82 | 10.735 | 38.625 | 4.956 | 48.2225 | 7.8455 |
| 374 | 84.402 | 27.865 | 37.659 | 6.895 | 61.0305 | 17.3800 |
| 375 | 72.533 | 12.7 | 45.661 | 5.549 | 59.0970 | 9.1245 |
| 376 | 68.34 | 7.43 | 44.068 | 4.428 | 56.2040 | 5.9290 |
| 377 | 70.417 | 6.309 | 53.79 | 6.279 | 62.1035 | 6.2940 |
| 378 | 61.427 | 3.64 | 47.649 | 2.676 | 54.5380 | 3.1580 |
| 379 | 95.519 | 18.074 | 57.492 | 7.143 | 76.5055 | 12.6085 |
| 380 | 65.481 | 5.625 | 42.825 | 2.2 | 54.1530 | 3.9125 |
| 381 | 59.761 | 9.824 | 33.808 | 2.686 | 46.7845 | 6.2550 |
| 382 | 58.179 | 4.499 | 36.306 | 3.105 | 47.2425 | 3.8020 |
| 383 | 73.232 | 3.793 | 41.961 | 2.581 | 57.5965 | 3.1870 |
| 384 | 69.482 | 14.129 | 34.575 | 5.662 | 52.0285 | 9.8955 |

[0230] These results show that DsiRNAs designed to target human PNPLA3 mRNA inhibit PNPLA3 expression in cells (as determined by a reduced amount of PNPLA3 mRNA in DsiRNA-transfected cells) and that the nucleotide sequences including the DsiRNA hits are useful for generating RNAi oligonucleotides to inhibit PNPLA3 expression. Further, these results demonstrate that multiple PNPLA3 target sequences are suitable for the RNAi-mediated inhibition of PNPLA3 expression.

### In Vivo Function

### Example 3: RNAi Oligonucleotide Inhibition of PNPLA3 Expression In Vivo

[0231] Of the 384 DsiRNAs screened in the HuH-7 cell-based assays described in Example 2, the nucleotide sequences of 192 DsiRNAs hits (Table 3) are selected for further evaluation in vivo. Briefly, the nucleotide sequences the selected DsiRNAs are used to generate 194 corresponding ds RNAi oligonucleotides including a nicked tetraloop GalNAc-conjugated structure (referred to herein as “GalNAc-conjugated PNPLA3 oligonucleotides”) having a 36-mer sense (passenger) strand and a 22-mer antisense (guide) strand. Further, the nucleotide sequences for the passenger strand and guide strand of the GalNAc-conjugated PNPLA3 oligonucleotides have a distinct pattern of modified nucleotides and phosphorothioate linkages (see, e.g., FIG. 1 for a schematic of the generic structure and chemical modification pattern of the GalNAc-conjugated PNPLA3 oligonucleotides). The three adenosine nucleotides of the tetraloop each are conjugated to a GalNAc moiety (CAS #: 14131-60-3).

TABLE 3
GalXC-PNPLA3: 192 GalXC Compound In Vitro Screen.

| PNPLA3 | Passenger | Guide | PNPLA3-F495 | | PNPLA3-F595 | |
|---|---|---|---|---|---|---|
| Oligo- | (sense) | (antisense) | % | % | % | % |
| nucleotide | (SEQ ID NO:) | (SEQ ID NO:) | Remaining | SEM | Remaining | SEM |
| 1 | 777 | 778 | 47.485 | 10.196 | 42.315 | 9.325 |
| 2 | 779 | 780 | 88.393 | 13.374 | 74.853 | 8.613 |
| 3 | 781 | 782 | 71.522 | 13.389 | 62.163 | 8.489 |
| 4 | 783 | 784 | 48.2 | 12.808 | 59.051 | 15.527 |
| 5 | 785 | 786 | 87.111 | 20.654 | 74.136 | 14.422 |
| 6 | 787 | 788 | 52.772 | 4.946 | 32.37 | 3.842 |
| 7 | 789 | 790 | 60 | 4.856 | 56.847 | 3.105 |
| 8 | 791 | 792 | 89.452 | 17.034 | 90.454 | 16.078 |
| 9 | 793 | 794 | 76.773 | 16.13 | 58.479 | 11.665 |
| 10 | 795 | 796 | 85.463 | 9.685 | 66.419 | 7.575 |
| 11 | 797 | 798 | 108.216 | 4.243 | 70.258 | 3.457 |
| 12 | 799 | 800 | 57.964 | 8.916 | 47.12 | 9.746 |
| 13 | 801 | 802 | 91.802 | 15.466 | 80.834 | 14.834 |
| 14 | 803 | 804 | 108.246 | 8.747 | 102.424 | 9.238 |
| 15 | 805 | 806 | 102.556 | 8.612 | 91.909 | 8.507 |
| 16 | 807 | 808 | 123.63 | 8.863 | 110.429 | 6.112 |
| 17 | 809 | 810 | 70.82 | 7.935 | 48.198 | 3.957 |
| 18 | 811 | 812 | 105.252 | 5.434 | 76.73 | 5.427 |
| 19 | 813 | 814 | 73.737 | 7.411 | 63.414 | 3.163 |
| 20 | 815 | 816 | 53.275 | 5.084 | 40.621 | 3.768 |
| 21 | 817 | 818 | 73.13 | 8.636 | 54.227 | 4.991 |
| 22 | 819 | 820 | 69.662 | 5.077 | 65.603 | 4.833 |
| 23 | 821 | 822 | 115.648 | 7.396 | 93.812 | 6.834 |
| 24 | 823 | 824 | 113.539 | 8.877 | 95.22 | 8.13 |
| 25 | 825 | 826 | 72.315 | 22.04 | 65.007 | 19.295 |
| 26 | 827 | 828 | 52.756 | 8.42 | 52.681 | 4.521 |
| 27 | 829 | 830 | 50.002 | 5.36 | 45.103 | 6.461 |
| 28 | 831 | 832 | 65.906 | 5.919 | 61.42 | 3.683 |
| 29 | 833 | 834 | 85.13 | 15.786 | 81.4 | 13.245 |
| 30 | 835 | 836 | 94.2 | 7.683 | 92.984 | 6.53 |
| 31 | 837 | 838 | 79.41 | 9.652 | 78.856 | 9.311 |
| 32 | 839 | 840 | 110.611 | 10.798 | 121.904 | 11.977 |
| 33 | 841 | 842 | 61.132 | 15.106 | 54.942 | 10.832 |
| 34 | 843 | 844 | 22.997 | 2.613 | 26.894 | 3.012 |
| 35 | 845 | 846 | 69.893 | 7.912 | 71.053 | 6.942 |
| 36 | 847 | 848 | 42.209 | 6.514 | 37.063 | 6.765 |
| 37 | 849 | 850 | 32.369 | 6.443 | 30.326 | 5.18 |
| 38 | 851 | 852 | 98.013 | 5.195 | 99.493 | 5.551 |
| 39 | 853 | 854 | 108.745 | 12.02 | 109.98 | 14.348 |
| 40 | 855 | 856 | 108.242 | 5.703 | 106.183 | 7.088 |
| 41 | 857 | 858 | 62.227 | 18.716 | 47.683 | 7.008 |
| 42 | 859 | 860 | 77.369 | 5.452 | 72.082 | 4.805 |
| 43 | 861 | 862 | 97.72 | 6.492 | 104.918 | 2.468 |
| 44 | 863 | 864 | 95.316 | 16.953 | 81.092 | 8.169 |
| 45 | 865 | 866 | 65.563 | 3.105 | 63.593 | 5.933 |
| 46 | 867 | 868 | 45.891 | 2.704 | 41.178 | 2.034 |
| 47 | 869 | 870 | 70.44 | 8.4 | 69.907 | 11.675 |
| 48 | 871 | 872 | 42.793 | 4.981 | 41.802 | 4.578 |
| 49 | 873 | 874 | 69.377 | 12.858 | 75.563 | 14.64 |
| 50 | 875 | 876 | 94.54 | 12.65 | 113.746 | 13.701 |
| 51 | 877 | 878 | 96.644 | 9.928 | 88.742 | 7.236 |
| 52 | 879 | 880 | 57.675 | 7.9 | 54.023 | 9.11 |
| 53 | 881 | 882 | 45.257 | 4.671 | 41.066 | 8.781 |
| 54 | 883 | 884 | 64.216 | 13.821 | 57.326 | 9.308 |
| 55 | 885 | 886 | 80.64 | 10.056 | 83.19 | 12.71 |
| 56 | 887 | 888 | 53.489 | 6.288 | 60.359 | 10.933 |
| 57 | 889 | 890 | 43.058 | 8.468 | 67.338 | 7.905 |
| 58 | 891 | 892 | 92.209 | 4.675 | 88.981 | 4.725 |
| 59 | 893 | 894 | 125.612 | 12.186 | 131.574 | 15.729 |
| 60 | 895 | 896 | 56.646 | 7.227 | 58.75 | 7.18 |
| 61 | 897 | 898 | 63.963 | 4.129 | 64.01 | 3.511 |
| 62 | 899 | 900 | 35.42 | 4.93 | 43.575 | 3.839 |
| 63 | 901 | 902 | 80.942 | 5.673 | 99.785 | 7.605 |
| 64 | 903 | 904 | 28.438 | 9.671 | 41.409 | 10.949 |
| 65 | 905 | 906 | 78.01 | 12.28 | 70.329 | 13.215 |
| 66 | 907 | 908 | 63.519 | 7.735 | 56.465 | 6.226 |
| 67 | 909 | 910 | 102.482 | 9.653 | 86.816 | 7.212 |
| 68 | 911 | 912 | 73.153 | 6.21 | 76.354 | 7.251 |
| 69 | 913 | 914 | 115.319 | 14.233 | 109.375 | 11.395 |
| 70 | 915 | 916 | 50.507 | 16.055 | 61.744 | 17.75 |
| 71 | 917 | 918 | 64.122 | 18.86 | 67.106 | 19.792 |
| 72 | 919 | 920 | 45.025 | 11.057 | 36.962 | 8.699 |
| 73 | 921 | 922 | 64.691 | 7.735 | 70.342 | 7.008 |
| 74 | 923 | 924 | 91.612 | 17.728 | 73.763 | 9.075 |
| 75 | 925 | 926 | 30.626 | 5.128 | 34.089 | 2.646 |
| 76 | 927 | 928 | 85.724 | 5.965 | 98.425 | 5.178 |
| 77 | 929 | 930 | 77.837 | 24.988 | 65.493 | 20.924 |
| 78 | 931 | 932 | 66.549 | 13.96 | 70.219 | 13.374 |
| 79 | 933 | 934 | 88.812 | 9.773 | 93.579 | 14.174 |
| 80 | 935 | 936 | 126.281 | 13.138 | 125.405 | 9.847 |
| 81 | 937 | 938 | 33.474 | 12.471 | 36.472 | 7.102 |
| 82 | 939 | 940 | 36.521 | 6.105 | 36.344 | 12.791 |
| 83 | 941 | 942 | 79.756 | 28.563 | 79.725 | 24.95 |
| 84 | 943 | 944 | 91.352 | 9.565 | 103.633 | 12.963 |
| 85 | 945 | 946 | 79.374 | 11.693 | 88.146 | 11.711 |
| 86 | 947 | 948 | 104.203 | 12.127 | 111.907 | 13.828 |
| 87 | 949 | 950 | 78.157 | 5.154 | 100.371 | 7.36 |
| 88 | 951 | 952 | 117.96 | 7.199 | 130.066 | 9.106 |
| 89 | 953 | 954 | 84.233 | 7.043 | 78.918 | 4.772 |
| 90 | 955 | 956 | 70.825 | 5.146 | 76.977 | 8.968 |
| 91 | 957 | 958 | 59.621 | 7.853 | 65.538 | 7.22 |
| 92 | 959 | 960 | 91.443 | 6.954 | 99.109 | 6.096 |
| 93 | 961 | 962 | 46.844 | 11.633 | 51.957 | 9.244 |
| 94 | 963 | 964 | 81.508 | 6.389 | 87.195 | 8.633 |
| 95 | 965 | 966 | 91.805 | 8.83 | 108.782 | 9.098 |
| 96 | 967 | 968 | 96.733 | 4.922 | 125.597 | 5.479 |
| 97 | 969 | 970 | 92.658 | 10.451 | 110.074 | 12.159 |
| 98 | 971 | 972 | 100.916 | 7.648 | 107.715 | 9.441 |
| 99 | 973 | 974 | 108.731 | 9.204 | 130.037 | 11.933 |
| 100 | 975 | 976 | 80.886 | 6.51 | 82.486 | 5.492 |
| 101 | 977 | 978 | 114.601 | 6.354 | 125.063 | 7.668 |
| 102 | 979 | 980 | 64.486 | 7.636 | 81.933 | 8.887 |
| 103 | 981 | 982 | 48.127 | 7.673 | 70.594 | 9.464 |
| 104 | 983 | 984 | 98.266 | 10.023 | 125.396 | 13.292 |
| 105 | 985 | 986 | 78.835 | 8.422 | 85.896 | 6.258 |
| 106 | 987 | 988 | 65.38 | 6.01 | 75.699 | 5.561 |
| 107 | 989 | 990 | 82.332 | 16.715 | 110.985 | 21.204 |
| 108 | 991 | 992 | 50.805 | 3.714 | 49.059 | 3.238 |
| 109 | 993 | 994 | 82.297 | 10.387 | 74.612 | 6.957 |
| 110 | 995 | 996 | 56.254 | 4.26 | 51.783 | 3.569 |
| 111 | 997 | 998 | 37.191 | 3.673 | 43.781 | 4.781 |
| 112 | 999 | 1000 | 54.832 | 3.334 | 45.421 | 4.277 |
| 113 | 1001 | 1002 | 24.729 | 2.434 | 22.466 | 2.637 |
| 114 | 1003 | 1004 | 34.923 | 6.177 | 40.356 | 5.286 |
| 115 | 1005 | 1006 | 42.682 | 3.081 | 57.453 | 2.391 |
| 116 | 1007 | 1008 | 30.325 | 3.011 | 34.404 | 1.82 |
| 117 | 1009 | 1010 | 70.118 | 7.78 | 89.223 | 8.905 |
| 118 | 1011 | 1012 | 43.339 | 6.479 | 44.854 | 6.904 |
| 119 | 1013 | 1014 | 104.192 | 5.672 | 110.895 | 6.371 |
| 120 | 1015 | 1016 | 95.131 | 8.872 | 108.847 | 8.363 |
| 121 | 1017 | 1018 | 22.097 | 2.259 | 25.862 | 3.07 |
| 122 | 1019 | 1020 | 50.635 | 11.129 | 59.072 | 10.096 |
| 123 | 1021 | 1022 | 68.368 | 9.482 | 90.191 | 15.479 |
| 124 | 1023 | 1024 | 50.658 | 2.598 | 62.686 | 2.149 |
| 125 | 1025 | 1026 | 67.692 | 4.608 | 104.474 | 6.486 |
| 126 | 1027 | 1028 | 60.169 | 6.81 | 103.156 | 11.309 |
| 127 | 1029 | 1030 | 37.137 | 3.679 | 49.778 | 7.312 |
| 128 | 1031 | 1032 | 87.29 | 4.881 | 127.439 | 10.802 |
| 129 | 1033 | 1034 | 41.409 | 6.549 | 47.012 | 11.236 |
| 130 | 1035 | 1036 | 32.213 | 7.175 | 43.875 | 10.706 |
| 131 | 1037 | 1038 | 77.807 | 7.013 | 109.299 | 9.799 |
| 132 | 1039 | 1040 | 37.026 | 6.758 | 49.133 | 8.307 |
| 133 | 1041 | 1042 | 57.723 | 5.921 | 70.531 | 6.977 |
| 134 | 1043 | 1044 | 94.403 | 10.058 | 130.999 | 12.973 |
| 135 | 1045 | 1046 | 42.258 | 3.137 | 56.368 | 4.699 |
| 136 | 1047 | 1048 | 77.667 | 6.622 | 106.147 | 4.946 |
| 137 | 1049 | 1050 | 51.002 | 3.36 | 62.009 | 6.073 |
| 138 | 1051 | 1052 | 38.522 | 4.21 | 43.297 | 7.219 |
| 139 | 1053 | 1054 | 75.103 | 5.866 | 115.191 | 7.77 |
| 140 | 1055 | 1056 | 46.405 | 3.737 | 57.89 | 3.035 |
| 141 | 1057 | 1058 | 34.308 | 4.135 | 44.278 | 3.532 |
| 142 | 1059 | 1060 | 36.66 | 3.327 | 48.931 | 4.389 |
| 143 | 1061 | 1062 | 36.323 | 6.447 | 50.414 | 7.284 |
| 144 | 1063 | 1064 | 48.346 | 4.964 | 69.682 | 5.951 |
| 145 | 1065 | 1066 | 71.349 | 8.498 | 63.576 | 12.402 |
| 146 | 1067 | 1068 | 66.855 | 7.354 | 54.028 | 10.308 |
| 147 | 1069 | 1070 | 58.02 | 6.725 | 81.61 | 6.225 |
| 148 | 1071 | 1072 | 46.107 | 4.599 | 47.578 | 5.721 |
| 149 | 1073 | 1074 | 79.89 | 11.647 | 94.885 | 12.091 |
| 150 | 1075 | 1076 | 51.93 | 6.887 | 60.564 | 5.631 |
| 151 | 1077 | 1078 | 67.023 | 11.379 | 78.549 | 9.92 |
| 152 | 1079 | 1080 | 69.029 | 12.304 | 64.36 | 9.232 |
| 153 | 1081 | 1082 | 56.372 | 11.395 | 50.897 | 6.456 |
| 154 | 1083 | 1084 | 54.923 | 8.02 | 56.301 | 7.96 |
| 155 | 1085 | 1086 | 47.848 | 4.993 | 52.756 | 4.92 |
| 156 | 1087 | 1088 | 72.997 | 5.423 | 89.098 | 8.279 |
| 157 | 1089 | 1090 | 49.577 | 9.222 | 61.752 | 9.967 |
| 158 | 1091 | 1092 | 57.345 | 5.967 | 55.082 | 5.124 |
| 159 | 1093 | 1094 | 49.719 | 8.465 | 50.474 | 6.318 |
| 160 | 1095 | 1096 | 66.221 | 8.527 | 60.526 | 6.042 |
| 161 | 1097 | 1098 | 59.431 | 5.38 | 51.367 | 4.575 |
| 162 | 1099 | 1100 | 44.241 | 2.416 | 42.17 | 2.266 |
| 163 | 1101 | 1102 | 67.893 | 7.786 | 85.144 | 7.578 |
| 164 | 1103 | 1104 | 54.101 | 3.156 | 64.663 | 5.874 |
| 165 | 1105 | 1106 | 74.353 | 11.203 | 73.215 | 11.059 |
| 166 | 1107 | 1108 | 91.603 | 5.407 | 78.535 | 4.566 |
| 167 | 1109 | 1110 | 86.259 | 4.861 | 84.54 | 5.247 |
| 168 | 1111 | 1112 | 100.862 | 9.39 | 83.472 | 3.848 |
| 169 | 1113 | 1114 | 64.233 | 6.416 | 55.446 | 5.259 |
| 170 | 1115 | 1116 | 82.913 | 8.265 | 67.499 | 6.098 |
| 171 | 1117 | 1118 | 63.834 | 4.157 | 66.965 | 7.54 |
| 172 | 1119 | 1120 | 87.059 | 6.502 | 80.608 | 3.299 |
| 173 | 1121 | 1122 | 52.896 | 8.619 | 50.91 | 8.301 |
| 174 | 1123 | 1124 | 89.834 | 8.687 | 60.792 | 7.648 |
| 175 | 1125 | 1126 | 56.928 | 16.722 | 55.37 | 13.438 |
| 176 | 1127 | 1128 | 91.989 | 35.495 | 98.901 | 26.361 |
| 177 | 1129 | 1130 | 78.111 | 6.12 | 85.965 | 5.555 |
| 178 | 1131 | 1132 | 81.351 | 5.528 | 68.852 | 4.702 |
| 179 | 1133 | 1134 | 82.851 | 10.171 | 87.313 | 8.301 |
| 180 | 1135 | 1136 | 94.367 | 3.317 | 87.13 | 5.434 |
| 181 | 1137 | 1138 | 108.095 | 11.973 | 99.858 | 9.769 |
| 182 | 1139 | 1140 | 95.753 | 5.346 | 87.366 | 6.613 |
| 183 | 1141 | 1142 | 88.199 | 15.408 | 67.131 | 13.665 |
| 184 | 1143 | 1144 | 102.928 | 9.669 | 84.541 | 9.709 |
| 185 | 1145 | 1146 | 48.692 | 11.647 | 48.288 | 10.808 |
| 186 | 1147 | 1148 | 84.114 | 6.361 | 82.348 | 3.469 |
| 187 | 1149 | 1150 | 89.182 | 14.563 | 92.44 | 12.983 |
| 188 | 1151 | 1152 | 85.958 | 10.066 | 85.508 | 8.055 |
| 189 | 1153 | 1154 | 56.68 | 12.506 | 63.775 | 15.034 |
| 190 | 1155 | 1156 | 77.223 | 11.068 | 75.609 | 8.161 |
| 191 | 1157 | 1158 | 85.696 | 6.162 | 92.128 | 6.673 |
| 192 | 1159 | 1160 | 50.761 | 3.422 | 51.217 | 2.474 |

[0232] Mouse studies: Various GalNAc-conjugated PNPLA3 oligonucleotides, some of which are listed in Table 3, are evaluated in hydrodynamic injection (HDI) mouse model. Additional HDI studies are listed in tables 4, 5 and 6. For these HDI studies, the mice are engineered to transiently express human PNPLA3 mRNA in hepatocytes. A GalNAc-conjugated PNPLA3 oligonucleotide control (SEQ ID NOs: 1165 & 1166) is used as a benchmark control. Briefly, 6-8-week-old female CD-1 mice are treated SQ with a GalNAc-conjugated PNPLA3 oligonucleotide at a dose level of 1 mg/kg. Three days later (72 hr.), the mice are hydrodynamically injected with a DNA plasmid encoding the full human PNPLA3 gene under control of a ubiquitous cytomegalovirus (CMV) promoter sequence. One day after introduction of the plasmid, liver samples are collected. Total RNA derived from these mice are subjected to qRT-PCR analysis for PNPLA3 mRNA, relative to mice treated only with an identical volume of PBS. The values are normalized for transfection efficiency using the NeoR gene included on the plasmid.

[0233] As shown in Tables 4, 5 and 6 a number of the GalNAc-conjugated PNPLA3 oligonucleotides tested inhibited PNPLA3 expression, as determined by a reduced amount of PNPLA3 mRNA in liver samples from oligonucleotide-treated mice relative to mice treated with PBS. The mean % of remaining PNPLA3 mRNA in liver samples of mice treated with the benchmark GalNAc-conjugated PNPLA3 oligonucleotide control relative to mice treated with PBS. Table 4 shows that 18 of the 21 GalNAc-conjugated PNPLA3 oligonucleotides inhibit PNPLA3 expression to a greater extent than the reference GalNAc-conjugated PNPLA3 oligonucleotide used as control. Sequences of these oligonucleotides along with the modification patterns and SEQ ID NOs. is disclosed in Table A

TABLE 4
discloses single 0.5 mg/kg GalXC-PNPLA3 S.c. Dose, Day 3 HDI, Day 4 Takedown, Liver qPCR

| | Group | | | | | | | | | | | |
|---|---|---|---|---|---|---|---|---|---|---|---|---|
| | | −1170 | | | | | | | | | | |
| Animal | PBS | (Ref.) | −643 | −1110 | −1162 | −1170 | −1699 | −1703 | −1708 | −2104 | −2143 | −2155 |
| 1 | 105.7 | 96.7 | 78.2 | | 69.2 | 76.5 | 65.0 | 41.6 | 68.1 | 56.7 | 82.5 | 60.7 |
| 2 | 104.5 | 66.6 | 101.7 | 88.0 | 72.0 | 89.3 | 82.9 | 81.8 | 98.1 | 69.3 | 61.6 | 81.5 |
| 3 | 89.9 | 115.5 | 96.8 | 99.7 | 54.2 | 23.3 | 53.0 | 46.5 | 85.6 | 41.6 | 77.7 | 70.0 |
| 4 | 99.9 | 57.1 | 64.1 | 92.2 | 84.4 | 26.7 | 69.6 | 48.6 | 61.8 | 29.3 | 92.5 | 81.0 |
| 5 | | 107.2 | 64.2 | 70.4 | 118.2 | 75.0 | 39.4 | 63.4 | 39.7 | 35.5 | 89.1 | 61.2 |
| Average: | 100.0 | 88.6 | 81.0 | 87.6 | 79.6 | 58.1 | 62.0 | 56.4 | 70.6 | 46.5 | 80.7 | 70.9 |
| SEM: | 3.6 | 11.4 | 7.9 | 6.2 | 10.8 | 13.8 | 7.4 | 7.3 | 10.0 | 7.3 | 5.4 | 4.5 |

| | Group | | | | | | | | | |
|---|---|---|---|---|---|---|---|---|---|---|
| Animal | −2156 | −2157 | −2163 | −2165 | −2170 | −2195 | −2200 | −2204 | −2205 | −2210 |
| 1 | 63.1 | 104.4 | 41.1 | 93.9 | 66.8 | 91.3 | 144.7 | 76.6 | 57.0 | 64.5 |
| 2 | 76.4 | 81.6 | 31.0 | 50.7 | 48.1 | 57.0 | 109.8 | 77.0 | 33.9 | |
| 3 | 80.5 | 123.1 | 30.8 | 36.6 | 47.8 | 28.7 | 87.5 | 104.5 | 26.8 | 58.7 |
| 4 | 83.0 | 107.6 | 36.3 | 52.3 | 46.8 | 56.0 | 102.6 | 64.1 | 41.6 | 60.3 |
| 5 | 42.4 | 153.9 | 50.1 | 23.5 | 89.2 | 48.6 | 84.1 | 173.5 | 36.6 | 83.0 |
| Average: | 69.1 | 114.1 | 37.9 | 51.4 | 59.7 | 56.3 | 105.7 | 99.1 | 39.2 | 66.6 |
| SEM: | 7.5 | 11.9 | 3.6 | 11.8 | 8.3 | 10.1 | 10.8 | 19.7 | 5.1 | 5.6 |

[0234] Table 5 and 6 show 2 additional sets of HDI Studies with 18 GalNAc-conjugated PNPLA3 oligonucleotides in each set using the same reference oligonucleotide. Sequences of these oligonucleotides along with the modification patterns and SEQ ID NOs. are disclosed in Table B and Table C respectively.

[0235] Based on these results, 10 GalNAc-conjugated PNPLA3 oligonucleotides are selected for evaluation of their ability to inhibit PNPLA3 expression in non-human primates (NHPs). The GalNAc-conjugated PNPLA3 oligonucleotides have chemically modified nucleotides of the pattern as shown in FIG. 1.

TABLE 5
discloses a Single 1 mg/kg s.c. dose, HDI 3 days post-dose, harvest 4 days post-dose

| | Group | | | | | | | | | | | | | | | | | | |
|---|---|---|---|---|---|---|---|---|---|---|---|---|---|---|---|---|---|---|---|
| | | | | | | | | | | | | | | | | | | | −2205 |
| Animal | PBS | −644 | −745 | −1126 | −1129 | −1130 | −1143 | −1147 | −1152 | −1229 | −1698 | −2137 | −2138 | −2140 | −2142 | −2144 | −2146 | −2149 | (ref) |
| 1 | | 57.2 | 116.3 | 35.0 | 66.3 | 108.6 | 41.3 | 60.4 | | 111.7 | 60.0 | 80.2 | 101.1 | 39.0 | 96.0 | 48.4 | 53.5 | | 18.1 |
| 2 | 120.1 | 55.2 | 121.8 | 41.0 | 82.9 | 68.5 | | 59.3 | 55.1 | 80.1 | 112.9 | 68.0 | 69.9 | 24.1 | 47.9 | | 78.1 | | 38.9 |
| 3 | 129.1 | 143.6 | 82.2 | 94.9 | 53.4 | 91.1 | 30.0 | | | 86.2 | 71.9 | 120.8 | 45.0 | 41.4 | 78.2 | 34.9 | | 23.5 | 65.7 |
| 4 | 50.8 | | 102.2 | 57.9 | 77.6 | 145.3 | 34.4 | 43.4 | 39.8 | 101.5 | 88.7 | | 47.0 | 41.0 | 95.5 | 37.6 | 47.1 | 26.2 | 36.7 |
| 5 | | 27.0 | 114.3 | 42.3 | 117.2 | 125.9 | 13.9 | 41.8 | 64.5 | 89.1 | 116.6 | 44.5 | 29.1 | 47.1 | 54.0 | 25.5 | | 16.5 | 38.2 |
| Average: | 100.0 | 70.7 | 107.4 | 54.2 | 79.5 | 107.9 | 29.9 | 51.3 | 53.1 | 93.7 | 90.0 | 78.4 | 58.4 | 38.5 | 74.3 | 36.6 | 59.6 | 22.1 | 39.5 |
| SEM: | 24.8 | 25.2 | 7.1 | 10.9 | 10.7 | 13.3 | 5.8 | 5.0 | 7.2 | 5.7 | 11.1 | 16.0 | 12.5 | 3.9 | 10.1 | 4.7 | 9.5 | 2.9 | 7.6 |

TABLE 6
discloses a Single 1 mg/kg s.c. dose, HDI 3 days post-dose, harvest 4 days post-dose

| | Group | | | | | | | | | | | | | | | | | | |
|---|---|---|---|---|---|---|---|---|---|---|---|---|---|---|---|---|---|---|---|
| | | | | | | | | | | | | | | | | | | | −2205 |
| Animal | PBS | −637 | −641 | −923 | −1116 | −1125 | −1136 | −1151 | −1157 | −1158 | −1173 | −1541 | −1163 | −1614 | −1697 | −2136 | −2176 | −2222 | (ref) |
| 1 | | 80.3 | 114.9 | 88.9 | 48.9 | 203.5 | 156.1 | 49.0 | 113.6 | 113.6 | 42.2 | 91.1 | 62.5 | 56.4 | 24.4 | 145.3 | 64.1 | 97.3 | 26.9 |
| 2 | 76.6 | 140.7 | 116.7 | 122.7 | 78.6 | 115.6 | | 101.3 | 72.8 | 95.2 | 99.6 | 50.1 | | 79.5 | 57.3 | 85.7 | 28.2 | 137.8 | 58.6 |
| 3 | 78.7 | 115.4 | 57.8 | 142.4 | 122.0 | 119.8 | 130.1 | 91.9 | 186.4 | 134.1 | 20.5 | 135.3 | 110.5 | 60.2 | 104.6 | 65.7 | 71.4 | 107.5 | 34.6 |
| 4 | 133.6 | 90.3 | 84.3 | 85.6 | 150.0 | 80.0 | | | 98.2 | 113.6 | 25.0 | | 203.1 | 44.8 | | 132.5 | 44.8 | 50.1 | 52.7 |
| 5 | 111.1 | 119.9 | 198.0 | 75.0 | 41.6 | 166.4 | 84.6 | 121.0 | 114.0 | | 44.2 | 45.9 | 96.0 | 44.9 | 52.0 | 179.6 | 35.4 | 90.3 | 55.6 |
| Average: | 100.0 | 109.4 | 114.3 | 102.9 | 88.2 | 137.1 | 123.6 | 90.8 | 117.0 | 114.1 | 46.3 | 80.6 | 118.0 | 57.2 | 59.6 | 121.8 | 48.8 | 96.6 | 45.7 |
| SEM: | 13.7 | 10.8 | 23.6 | 12.7 | 20.9 | 21.6 | 20.9 | 15.2 | 18.9 | 7.9 | 14.1 | 20.9 | 30.1 | 6.4 | 16.7 | 20.6 | 8.3 | 14.2 | 6.3 |

[0236] Table 7 discloses an additional HDI Study using the best GalNAc-conjugated PNPLA3 oligonucleotides (hits) based on the results obtained from the previous studies and previous 3 HDI screens, as disclosed in tables 4, 5 and 6. Sequences of the oligonucleotides along with the modification patterns and SEQ ID NOs. used in this HDI screen are disclosed in Table D.

TABLE 7
comparison of hits from earlier studies and 3 HDI screens with Single 1 mg/kg s.c.
dose, HDI 3 days post-dose, harvest 4 days post-dose.

| | Group | | | | | | | | | | | | |
|---|---|---|---|---|---|---|---|---|---|---|---|---|---|
| Animal | PBS | −639 | −644 | −729 | −735 | −743 | −744 | −838 | −1126 | −1143 | −1147 | −1152 | −1173 |
| 1 | 98.7 | 58.8 | 22.9 | 114.6 | 119.1 | 106.5 | 94.7 | 45.3 | 64.6 | 24.8 | 70.5 | 55.2 | 26.0 |
| 2 | 99.9 | 62.3 | 30.7 | 108.6 | 85.0 | 105.4 | 55.4 | 48.1 | 30.4 | 16.8 | 24.7 | 71.6 | 10.7 |
| 3 | 143.0 | 87.9 | 10.1 | 106.3 | 97.4 | 76.2 | 61.1 | 91.8 | 39.1 | 18.4 | 33.4 | 50.5 | 18.2 |
| 4 | 115.1 | 89.6 | 19.2 | 99.5 | 84.0 | 99.8 | 56.5 | 68.5 | 61.2 | 26.7 | 59.3 | 58.2 | 10.8 |
| 5 | 89.2 | 91.4 | 41.1 | 94.5 | 105.8 | 115.0 | 113.8 | 48.6 | 54.6 | 30.3 | 47.2 | 59.8 | 35.5 |
| Average: | 109.2 | 78.0 | 24.8 | 104.7 | 98.3 | 100.6 | 76.3 | 60.5 | 50.0 | 23.4 | 47.0 | 59.1 | 20.2 |
| SEM: | 9.4 | 7.2 | 5.3 | 3.5 | 6.6 | 6.6 | 11.9 | 8.9 | 6.6 | 2.5 | 8.3 | 3.5 | 4.7 |

| | Group | | | | | | | | | |
|---|---|---|---|---|---|---|---|---|---|---|
| Animal | −1697 | −1699 | −1703 | −2140 | −2144 | −2149 | −2156 | −2195 | −2205 | PBS |
| 1 | 88.2 | 18.7 | 44.9 | 29.4 | 13.4 | 32.7 | 76.2 | 62.3 | 36.2 | 85.1 |
| 2 | 53.5 | 27.3 | 34.6 | 22.1 | 20.4 | 20.1 | 56.4 | 48.8 | 29.2 | 127.9 |
| 3 | 72.2 | 43.1 | 34.3 | 51.1 | 31.8 | 21.1 | 55.1 | 31.2 | 40.9 | 97.7 |
| 4 | 27.8 | 33.0 | 22.2 | 34.2 | 73.1 | 17.1 | 40.8 | 43.5 | 30.7 | 74.6 |
| 5 | 25.0 | 26.1 | 23.9 | 19.1 | 59.8 | 16.7 | 62.5 | 88.6 | 30.5 | 68.9 |
| Average: | 53.3 | 29.6 | 32.0 | 31.2 | 39.7 | 21.5 | 58.2 | 54.9 | 33.5 | 90.8 |
| SEM: | 12.3 | 4.1 | 4.1 | 5.6 | 11.5 | 2.9 | 5.7 | 9.8 | 2.2 | 10.5 |

[0237] NHP studies: 10 GalNAc-conjugated PNPLA3 oligonucleotides selected from table 7 are evaluated in cynomolgus monkeys (Macaca fascicularis). Here, the NHPs are grouped so that their mean body weights (about 5.4 kg) are comparable between the control and experimental groups. Each cohort contains two male and three female subjects. The GalNAc-conjugated PNPLA3 oligonucleotides are administered SQ on Study Day 0. Blood samples are collected on Study Days −8, −5 and 0, and weekly after dosing. Ultrasound-guided core needle liver biopsies are collected on Study Days −7, 28 and 56. At each time point, total RNA derived from the liver biopsy samples is subjected to qRT-PCR analysis to measure PNPLA3 mRNA in oligonucleotide-treated monkeys relative to monkeys treated with a comparable volume of PBS. To normalize the data, the measurements are made relative to the geometric mean of two reference genes, PPIB and 18S rRNA. As shown in Table 8 (Day −7), Table 9 (Day 28), and Table 10 (Day 56), treating NHPs with the GalNAc-conjugated PNPLA3 oligonucleotides inhibits PNPLA3 expression in the liver, as determined by a reduced amount of PNPLA3 mRNA in liver samples from oligonucleotide-treated NHPs relative to NHPs treated with PBS. For all time points evaluated, PNPLA3 oligonucleotides 34, 81 and 121 inhibit PNPLA3 expression to a greater extent than the benchmark PBS and time-matched controls. From the same NHP study, inhibition of PNPLA3 expression is also determined by measuring PNPLA3 protein in serum prepared from the pre-dose and weekly blood samples by ELISA. Taken together, these results demonstrate that treating NHPs with GalNAc-conjugated PNPLA3 oligonucleotides reduces the amount of PNPLA3 mRNA in the liver and concomitantly reduces the amount of PNPLA3 protein in the serum.

TABLE 8
PNPLA3 mRNA Knockdown of Select GalNAc-Conjugated
PNPLA3 Oligonucleotides in NHP at Day −7.

| | Passenger | Guide | |
|---|---|---|---|
| | (sense) | (antisense) | Mean % KD, Rel To |
| Sequence | (SEQ ID NO:) | (SEQ ID NO:) | Time-Matched PBS |
| PBS | — | — | 0 |
| 644 | 1220 | 1221 | 29 |
| 1126 | 1224 | 1225 | −4.9 |
| 1143 | 1230 | 1231 | 43 |
| 1147 | 1232 | 1233 | −2.5 |
| 1699 | 1188 | 1189 | 44 |
| 1703 | 1190 | 1191 | 28 |
| 2140 | 1244 | 1245 | 27 |
| 2149 | 1250 | 1251 | 20 |
| 1697 | 1254 | 1255 | 5.9 |
| 2144 | 1246 | 1247 | −15 |

TABLE 9
PNPLA3 mRNA Knockdown of Select GalNAc-Conjugated PNPLA3
Oligonucleotides in NHP at Day 28.

| | | | Mean | Mean | Mean % |
|---|---|---|---|---|---|
| | Passenger | Guide | % KD, Rel | % KD, | KD, Rel To |
| | (sense) | (antisense) | To Time- | Rel to | Individual |
| | (SEQ | (SEQ | Matched | mean of | Animal |
| Sequence | ID NO:) | ID NO:) | PBS | pre-dose | Predose |
| PBS | — | — | 0 | −9.8 | −30 |
| 644 | 1220 | 1221 | 34 | −3 | −17 |
| 1126 | 1224 | 1225 | 50 | 48 | 36 |
| 1143 | 1230 | 1231 | 54 | 11 | −0.1 |
| 1147 | 1232 | 1233 | −2.4 | −9.8 | 11 |
| 1699 | 1188 | 1189 | 65 | 32 | 30 |
| 1703 | 1190 | 1191 | 60 | 39 | 19 |
| 2140 | 1244 | 1245 | 65 | 47 | 40 |
| 2149 | 1250 | 1251 | 64 | 51 | 48 |
| 1697 | 1254 | 1255 | 49 | 40 | 42 |
| 2144 | 1246 | 1247 | 50 | 53 | 51 |

TABLE 10
PNPLA3 mRNA Knockdown of Select GalNAc-Conjugated
PNPLA3 Oligonucleotides in NHP at Day 56.

| | | | | | Mean % |
|---|---|---|---|---|---|
| | | | Mean | Mean | KD, Rel |
| | Passenger | Guide | % KD, Rel | % KD, | to |
| | (sense) | (antisense) | to Time- | Rel to | Individual |
| | (SEQ | (SEQ | Matched | Mean of | Animal |
| Sequence | ID NO:) | ID NO:) | PBS | Pre-Dose | Predose |
| PBS | — | — | 0 | 5 | −12 |
| 644 | 1220 | 1221 | 46 | 28 | 28 |
| 1126 | 1224 | 1225 | 39 | 45 | 27 |
| 1143 | 1230 | 1231 | 35 | −9.2 | −32 |
| 1147 | 1232 | 1233 | 28 | 34 | 29 |
| 1699 | 1188 | 1189 | 51 | 18 | 14 |
| 1703 | 1190 | 1191 | 5.5 | −24 | −45 |
| 2140 | 1244 | 1245 | −34 | −73 | −100 |
| 2149 | 1250 | 1251 | 48 | 39 | 36 |
| 1697 | 1254 | 1255 | 32 | 31 | 31 |
| 2144 | 1246 | 1247 | −9.8 | 9.7 | 4.4 |

[0238] Taken together, these results show that GalNAc-conjugated PNPLA3 oligonucleotides designed to target human PNPLA3 mRNA inhibit PNPLA3 expression in vivo (as determined by the reduction of the amount of PNPLA3 mRNA and PNPLA3 protein in treated animals).

### SEQUENCES

[0239] The following nucleic acid sequences and/or amino acid sequences are referred to in the disclosure and are provided below for reference.

SEQ ID NO: 1 - wild-type human PNPLA3 (2753 bp; NCBI Ref. Seq. No. NM_025225.3)
agagagcgcttgcgggcgccgggcggagctgctgcggatcaggacccgagccgattcccgatcccgacccagatcctaacccgc
gcccccgccccgccgccgccgccatgtacgacgcagagcgcggctggagcttgtccttcgcgggctgcggcttcctgggcttctac
cacgtcggggcgacccgctgcctgagcgagcacgccccgcacctcctccgcgacgcgcgcatgttgttcggcgcttcggccgggg
cgttgcactgcgtcggcgtcctctccggtatcccgctggagcagactctgcaggtcctctcagatcttgtgcggaaggccaggagtcg
gaacattggcatcttccatccatccttcaacttaagcaagttcctccgacagggtctctgcaaatgcctcccggccaatgtccaccagctc
atctccggcaaaataggcatctctcttaccagagtgtctgatggggaaaacgttctggtgtctgactttcggtccaaagacgaagtcgtg
gatgccttggtatgttcctgcttcatccccttctacagtggccttatccctccttccttcagaggcgtgcgatatgtggatggaggagtgag
tgacaacgtacccttcattgatgccaaaacaaccatcaccgtgtcccccttctatggggagtacgacatctgccctaaagtcaagtccac
gaactttcttcatgtggacatcaccaagctcagtctacgcctctgcacagggaacctctaccttctctcgagagcttttgtccccccggat
ctcaaggtgctgggagagatatgccttcgaggatatttggatgcattcaggttcttggaagagaagggcatctgcaacaggccccagc
caggcctgaagtcatcctcagaagggatggatcctgaggtcgccatgcccagctgggcaaacatgagtctggattcttccccggagtc
ggctgccttggctgtgaggctggagggagatgagctgctagaccacctgcgtctcagcatcctgccctgggatgagagcatcctgga
caccctctcgcccaggctcgctacagcactgagtgaagaaatgaaagacaaaggtggatacatgagcaagatttgcaacttgctaccc
attaggataatgtcttatgtaatgctgccctgtaccctgcctgtggaatctgccattgcgattgtccagagactggtgacatggcttccaga
tatgcccgacgatgtcctgtggttgcagtgggtgacctcacaggtgttcactcgagtgctgatgtgtctgctccccgcctccaggtccca
aatgccagtgagcagccaacaggcctccccatgcacacctgagcaggactggccctgctggactccctgctcccccaagggctgtc
cagcagagaccaaagcagaggccaccccgcggtccatcctcaggtccagcctgaacttcttcttgggcaataaagtacctgctggtg
ctgaggggctctccacctttcccagtttttcactagagaagagtctgtgagtcacttgaggaggcgagtctagcagattctttcagaggtg
ctaaagtttcccatctttgtgcagctacctccgcattgctgtgtagtgacccctgcctgtgacgtggaggatcccagcctctgagctgagt
tggttttatgaaaagctaggaagcaacctttcgcctgtgcagcggtccagcacttaactctaatacatcagcatgcgttaattcagctggtt
gggaaatgacaccaggaagcccagtgcagagggtcccttactgactgtttcgtggccctattaatggtcagactgttccagcatgaggt
tcttagaatgacaggtgtttggatgggtgggggccttgtgatggggggtaggctggcccatgtgtgatcttgtggggtggagggaaga
gaatagcatgatcccacttccccatgctgtgggaaggggtgcagttcgtccccaagaacgacactgcctgtcaggtggtctgcaaaga
tgataaccttgactactaaaaacgtctccatggcgggggtaacaagatgataatctacttaattttagaacacctttttcacctaactaaaat
aatgtttaaagagttttgtataaaaatgtaaggaagcgttgttacctgttgaattttgtattatgtgaatcagtgagatgttagtagaataagcc
ttaaaaaaaaaaaaatcggttgggtgcagtggcacacggctgtaatcccagcactttgggaggccaaggttggcagatcacctgaggt
caggagttcaagaccagtctggccaacatagcaaaaccctgtctctactaaaaatacaaaaattatctgggcatggtggtgcatgcctgt
aatcccagctattcggaaggctgaggcaggagaatcacttgaacccaggaggcggaggttgcggtgagctgagattgcaccatttca
ttccagcctgggcaacatgagtgaaagtctgactcaaaaaaaaaaaatttaaaaaacaaaataatctagtgtgcagggcattcacctca
gccccccaggcaggagccaagcacagcaggagcttccgcctcctctccactggagcacacaacttgaacctggcttattttctgcagg
gaccagccccacatggtcagtgagtttctccccatgtgtggcgatgagagagtgtagaaataaagacacaagacaaagaga
SEQ ID NO: 2 - wild-type human PNPLA3 (481 aa; NCBI Ref. Seq. No. NP_079501.2)
MYDAERGWSLSFAGCGFLGFYHVGATRCLSEHAPHLLRDARMLFGASAGALHCVG
VLSGIPLEQTLQVLSDLVRKARSRNIGIFHPSFNLSKFLRQGLCKCLPANVHQLISGKI
GISLTRVSDGENVLVSDFRSKDEVVDALVCSCFIPFYSGLIPPSFRGVRYVDGGVSDN
VPFIDAKTTITVSPFYGEYDICPKVKSTNFLHVDITKLSLRLCTGNLYLLSRAFVPPDL
KVLGEICLRGYLDAFRFLEEKGICNRPQPGLKSSSEGMDPEVAMPSWANMSLDSSPE
SAALAVRLEGDELLDHLRLSILPWDESILDTLSPRLATALSEEMKDKGGYMSKICNLL
PIRIMSYVMLPCTLPVESAIAIVQRLVTWLPDMPDDVLWLQWVTSQVFTRVLMCLLP
ASRSQMPVSSQQASPCTPEQDWPCWTPCSPKGCPAETKAEATPRSILRSSLNFFLGNK
VPAGAEGLSTFPSFSLEKSL
SEQ ID NO: 3 - human PNPLA3 I148M (variant) mRNA
agagagcgcttgcgggcgccgggcggagctgctgcggatcaggacccgagccgattcccgatcccgacccagatcctaacccgc
gcccccgccccgccgccgccgccatgtacgacgcagagcgcggctggagcttgtccttcgcgggctgcggcttcctgggcttctac
cacgtcggggcgacccgctgcctgagcgagcacgccccgcacctcctccgcgacgcgcgcatgttgttcggcgcttcggccgggg
cgttgcactgcgtcggcgtcctctccggtatcccgctggagcagactctgcaggtcctctcagatcttgtgcggaaggccaggagtcg
gaacattggcatcttccatccatccttcaacttaagcaagttcctccgacagggtctctgcaaatgcctcccggccaatgtccaccagctc
atctccggcaaaataggcatctctcttaccagagtgtctgatggggaaaacgttctggtgtctgactttcggtccaaagacgaagtcgtg
gatgccttggtatgttcctgcttcatgcccttctacagtggccttatccctccttccttcagaggcgtgcgatatgtggatggaggagtgag
tgacaacgtacccttcattgatgccaaaacaaccatcaccgtgtcccccttctatggggagtacgacatctgccctaaagtcaagtccac
gaactttcttcatgtggacatcaccaagctcagtctacgcctctgcacagggaacctctaccttctctcgagagcttttgtccccccggat
ctcaaggtgctgggagagatatgccttcgaggatatttggatgcattcaggttcttggaagagaagggcatctgcaacaggccccagc
caggcctgaagtcatcctcagaagggatggatcctgaggtcgccatgcccagctgggcaaacatgagtctggattcttccccggagtc
ggctgccttggctgtgaggctggagggagatgagctgctagaccacctgcgtctcagcatcctgccctgggatgagagcatcctgga
caccctctcgcccaggctcgctacagcactgagtgaagaaatgaaagacaaaggtggatacatgagcaagatttgcaacttgctaccc
attaggataatgtcttatgtaatgctgccctgtaccctgcctgtggaatctgccattgcgattgtccagagactggtgacatggcttccaga
tatgcccgacgatgtcctgtggttgcagtgggtgacctcacaggtgttcactcgagtgctgatgtgtctgctccccgcctccaggtccca
aatgccagtgagcagccaacaggcctccccatgcacacctgagcaggactggccctgctggactccctgctcccccaagggctgtc
cagcagagaccaaagcagaggccaccccgcggtccatcctcaggtccagcctgaacttcttcttgggcaataaagtacctgctggtg
ctgaggggctctccacctttcccagtttttcactagagaagagtctgtgagtcacttgaggaggcgagtctagcagattctttcagaggtg
ctaaagtttcccatctttgtgcagctacctccgcattgctgtgtagtgacccctgcctgtgacgtggaggatcccagcctctgagctgagt
tggttttatgaaaagctaggaagcaacctttcgcctgtgcagcggtccagcacttaactctaatacatcagcatgcgttaattcagctggtt
gggaaatgacaccaggaagcccagtgcagagggtcccttactgactgtttcgtggccctattaatggtcagactgttccagcatgaggt
tcttagaatgacaggtgtttggatgggtgggggccttgtgatggggggtaggctggcccatgtgtgatcttgtggggtggagggaaga
gaatagcatgatcccacttccccatgctgtgggaaggggtgcagttcgtccccaagaacgacactgcctgtcaggtggtctgcaaaga
tgataaccttgactactaaaaacgtctccatggcgggggtaacaagatgataatctacttaattttagaacacctttttcacctaactaaaat
aatgtttaaagagttttgtataaaaatgtaaggaagcgttgttacctgttgaattttgtattatgtgaatcagtgagatgttagtagaataagcc
ttaaaaaaaaaaaaatcggttgggtgcagtggcacacggctgtaatcccagcactttgggaggccaaggttggcagatcacctgaggt
caggagttcaagaccagtctggccaacatagcaaaaccctgtctctactaaaaatacaaaaattatctgggcatggtggtgcatgcctgt
aatcccagctattcggaaggctgaggcaggagaatcacttgaacccaggaggcggaggttgcggtgagctgagattgcaccatttca
ttccagcctgggcaacatgagtgaaagtctgactcaaaaaaaaaaaatttaaaaaacaaaataatctagtgtgcagggcattcacctca
gccccccaggcaggagccaagcacagcaggagcttccgcctcctctccactggagcacacaacttgaacctggcttattttctgcagg
gaccagccccacatggtcagtgagtttctccccatgtgtggcgatgagagagtgtagaaataaagacacaagacaaagaga
SEQ ID NO: 4 - human PNPLA3 I148M (variant)
[sequence omitted]
SEQ ID NO: 5 - primate PNPLA3 (2291 bp; NCBI Ref. Seq. No. XM_015457081.1)
cgagggaggcggggcggacgtcgcgcgtggaaagcccgggcggagacgcggcggctgggtcacgagcgcttgcgggcgccc
ggcggagctgctgcggatcaggacccgagccgatccccgatcccgactccgatccggatccgcgcccccgcccccgccccgccat
gtacgacgccgagcgcggctggagcttgtccttcgcgggctgcggcttcctgggcttctaccacgtcggggcgacccggtgcctga
gcgagcacgccccgcacctcctccgcgacgcgcgcatgttgttcggcgcctcggccggggcgttgcactgcgtcggcgtcctctcc
gggatcccgctggagcagactctgcaggtcctctcagatcttgtccggaaggccaggagtcggaacattggtatcttccatccatcctt
caacataggcaagttcctccgacaggatctctacaaatacctcccggccaatgtccaccagctcatctctggcaaaatatgcgtctcact
caccagagtgtctgatggggaaaacgttctggtgtctgactttcagtccaaagacgaagtcgtggatgccttgatttgttcctgcttcatcc
ctttctacagtggccttatccctccttccttcagaggcgtgcgatatgtggatggaggagcgagtgacaacgtacccttcattgatgccaa
gacaaccatcaccgtgtcgcccttctatggggagtacgacatctgccctaaagtcaagtccaccaactttcttcatgtggacatcaccaa
gctcagcctacgcctctgcacagggaacctctaccttctctcaagagcgtttgtccccccggatctcaaggtgctgggagagatatgcc
ttcgaggatatttggacgcgttcaggttcttggaagagaagggcatctgcaacaagccccagcggggtctgaagtcatcctcagaagg
gatggattctgaggtcactgcgcccggctgggaaaacacaagtctggattcttccccggagccggctgccttggctatgaggctggat
ggagatgagctgctagaccacctgcgtctcagcatcctgccctgggatgagagcatcctggacaccctgtcgcccgagctcgctaca
gtgagtgaagcaatgaaagacaaaggtggatacatgagcaagatttgcaacttgctacccattaggataatatcttatgtgatgctgccc
tgtaccctgcctgtggagtctgccattgcgattgtccagagactggtgacatggcttccagatatgcccgacgatgtgcagtggctgca
gtgggtgacctcacaggtcttcactcgagcgctgatgtgtctgcttcccgcctccaggtcccaaatgccagtgagcagcgaacaggcc
tccccatgcaaaccggagcaggactggcactgctggactccctgctcccccgaggactgtcctgcagaggccaaagcagaggctac
cccacggtccatcctcaggtccagcctgaacttcttctggggcaataaagtacctgctggtgctgaggggctctccacctttcccagtttt
tcactggagaagaatttgtgagtcatttgaggaggcgagtctaggagattctttcagaggtgctaaagcttcccatctttgtgcagctacct
ccgcattgccgtgtagtgacccctgcctgtgacgtggaggatcccagcctctgagctgagttggttttatgaaaagctaggaagcaatg
tttggtctgtgcagcagtccagcacttaagtctaatacgtcagcatgcgttagttcagctggttgggaaatgacaccgggaagcctagcg
cagagggtcccttactgactatttcatggtcctattaatggtcagactgttccagtgtgaggttcttagaatgactagtgtttggatgggtgg
gggccttgtggtggggggtgggctggcctatgtgtgatcttgtggggtggaaggaagagagtagcacaatcccacctccccatgccg
tgggaaggggtgcacttggttcccaagaaggacactgcctgtcaggtggcctgcaaatataataaccttgacaactaaaaacctctcca
tgggggtgggaggtaccaagataataaccgatttacattttagagcacctttttcacctaactaaaataatgtttaaagagttttatataaaa
atgtaaggaagagttgttatctgttgaattttgtattatatgaatcagtgagatgttaatagaataagcctt
SEQ ID NO: 6 - primate PNPLA3 (480 aa; NCBI Ref. Seq. No. XP_015312567.1)
MYDAERGWSLSFAGCGFLGFYHVGATRCLSEHAPHLLRDARMLFGASAGALHCVG
VLSGIPLEQTLQVLSDLVRKARSRNIGIFHPSFNIGKFLRQDLYKYLPANVHQLISGKI
CVSLTRVSDGENVLVSDFQSKDEVVDALICSCFIPFYSGLIPPSFRGVRYVDGGASDN
VPFIDAKTTITVSPFYGEYDICPKVKSTNFLHVDITKLSLRLCTGNLYLLSRAFVPPDL
KVLGEICLRGYLDAFRFLEEKGICNKPQRGLKSSSEGMDSEVTAPGWENTSLDSSPEP
AALAMRLDGDELLDHLRLSILPWDESILDTLSPELATVSEAMKDKGGYMSKICNLLPI
RIISYVMLPCTLPVESAIAIVQRLVTWLPDMPDDVQWLQWVTSQVFTRALMCLLPAS
RSQMPVSSEQASPCKPEQDWHCWTPCSPEDCPAEAKAEATPRSILRSSLNFFWGNKV
PAGAEGLSTFPSFSLEKNL
SEQ ID NO: 7 - mouse PNPLA3 (4675 bp; NCBI Ref. Seq. No. XM_006520346.5)
cacccgaagacagcttaggcggctgcggctctttaagctcagagcagcaacaccgggagcagagctgaactgcagcgccgcccgg
agcttcaagcaccatgtatgacccagagcgccgctggagcctgtcgtttgcaggctgcggcttcctgggcttctaccacgtcggggct
acgctatgtctgagcgagcgcgccccgcacctcctccgcgatgcgcgcactttctttggctgctcggccggtgcactgcacgcggtca
ccttcgtgtgcagtctccctctcggtgcgtccacggccactacccaggccccgcgtgcggggaggggttgctacacctggggaatcg
gtaacactttccggggtgcccgaagaaacctgtccggagagctctcatccttcccggtgccgttgagcactcagctggagaccctggg
cctgtcacctggcgtgggatttcccggggccggctggagcagacgcgctccgagcatcttcttcctgacccgctctggcgccctggtc
ctgtcagctgggtcatccctgagcagcagggaacgacgcaggtttgccgggtcctctggtccctgagccgcagaaggccgtataatg
gagatcctcatggacctcgtgcggaaagccaggagccgcaacatcggcaccctccacccgttcttcaacattaacaagtgcatcaga
gacgggctccaggagagcctcccagacaatgtccaccaggtcatttctggcaaggttcacatctcactcaccagggtgtcggatggg
gagaacgtgctggtgtctgagttccattccaaagacgaagtcgtggatgccctggtgtgttcctgcttcattcccctcttctctggcctaat
ccctccttccttccgaggcgagcggtacgtggacggaggagtgagcgacaacgtccctgtgctggatgccaaaaccaccatcacggt
gtcacctttctacggtgagcatgacatctgccccaaagtcaagtccaccaacttcttccacgtgaatatcaccaacctcagcctccgcct
ctgcactgggaacctccaacttctgaccagagcgctcttcccgtctgatgtgaaggtgatgggagagctgtgctatcaagggtacctgg
acgccttccggttcctggaggagaatggcatctgtaacgggccacagcgcagcctgagtctgtccttggtggcgccagaagcctgctt
ggaaaatggcaaacttgtgggagacaaggtgccagtcagcctatgctttacagatgagaacatctgggagacactgtcccccgagct
cagcacagctctgagtgaagcgattaaggacagggagggctacctgagcaaagtctgcaacctcctgcccgtcaggatcctgtccta
catcatgctgccctgcagtctgcccgtggagtcggctatcgctgcagtccacaggctggtgacatggctccctgatatccaggatgata
tccagtggctacaatgggcgacatcccaggtttgtgcccgaatgacgatgtgcctgctcccctctaccagcatgagattcctgggacaa
tcccaattccttggcctccattgtatcaaagggctgaaaaccaaagggaaggcacagctgtctcttcagcatgcctcttctgccagaacc
actgcaaggtttggtgctcaggctgtgcaaacattctagcaatgtttgactcagtgtcaagcaggtgacaaggaacatggtgctgtgtgg
ggggaacccatggcccaggtgagggcttattggtgggtgaagctgtgggtgttcaggtggtggagaaggccttaagggatgggact
gacacctcagcactgaaggcaggaggaagctgtggctctgggttgcacccctgcctggctccaccctctctggcatctgtagaagtta
cagctggttcttcctctcagccccatgctcccagaaataagactcagacccaaattatagttacaaataccttggccatatagctaggctc
ttctcagactagctcataacttaactcattaattttaacctccatcctgccacatggctggtggcctgtgctcaggtaccatgagtccagctc
ttcacatctttccggatgaatcttccataattctttctgcctcctggatgttccaccttctattccaccttttcctataggccatggttttgtttttgt
tttttttttccaaatttaatttaattaattaatttatttatttttggtttttcgagacagggtttctctgtatcgccctggctgtcctggaactcactatg
taagccaggctggcctcaaactcagaaatccgcctgcctctgcctcctgagtgctgggattaaaggcgtgcgcaaccatgcccggtgt
ggtttttttttttttttaattgacaggtggatgcatctatataatccataacatattctctctacaggtatctattaggttttgggtgaggtgtggag
ttctagggaactctgagagaaattcctggggagtaagtggtttatcaagttgattggaggagtttttaatgctatggacagacagacagaa
ggacaacagcatagtcggggctaccagggagttcaggccccggcatcggagatagaagcaggatggggtctttgaagagattctga
gcccacacagcagaggagggactctctctttagagcttttgaggatgagggaggttgactgcaagagcctacagccaggctcgaggc
aggcagggggtggggagcaggatgtaaaccccttcgatgctgacagactcacttctggggtaaaatattatgagatgcctgtcagtgt
ctgtgaagagacctgagcagagtctggattctgacatcaatcatgttcttacaatactgaagacctgagagcctgcaatcttggtttgtaa
attgctggtctccgtgcttccagtgaacttggacattcttctcatggttggtccaggagaggccaaagctgagggcaccctgccttccac
ccccagtccagcttgaccttttatctggagcaacagtgtctagatgatgggtgggtgaggggtgctatactgtctgtccctctgggaagg
gttctgttacttttggaggcagctaggaagtttctctgtgcagctgccccctggtgctgtgtggtgacctcattgcctgtgaccccaggatc
acaggatctgggctaaagtggtagtccatagaaaccaaagacaatgatttggtgtttagaaagctactcttggtctgggtgaagtctggt
gcttaagggctatcacaaagagcgtgtcaaaccatctctcagcctgtgagtcagtggggagcccaagggcatcagtgtttggaaactg
gaatccaaaccgggcaatctcggaaggaaactgtttaggaattgtgatgggacgggccgtggctgtctctgaaaagggcctgccaga
taacttattacttttaaggacacctttggctcttactaatttataaagcattttatataaacacaccagggagtgcatggtgaactacacgtat
gatcagttaagtggggctagaattaggtagggagagcatcggacctctgcctcctcaacctcaacttgcttgctttctccactggctcca
aatctttgtatagtcatcagccatgaccacctctctccctccccatctactaccagcagcgttaatgggaataagtacccacttctctcagg
tgtactatacagctgtgggtgtggtgtgtgtttcctgtaattcacactttagaaaggaaacaagcaaacaaaagaaaccaggtgctgccc
atactcctaagtgtagacagtgaaggtgtgtgtctcccatgcctgagtctcctggaggcctagtgagctccaggttcatgcaagcacatc
aggaggaatcatataatctcagcacggttgatccagatgggataagaaaggactctgggagagagaatgtggttctagagacaaagt
gtctaggctacacagaagataagactgtcccaaggaaagaaaagaaaccaggaactagggtgcagctcagttgtcagaggacttctc
taggcttgaagcccagagtccaatctcagcaccttataaactgtggagtgacaggcagtgacatcggcctgtaatcccaacactcaag
cagtagaggcaagaggatcataagttcaaggtcttccttggctatttagggagttggaggttagctctggctacatgagaccctgtctca
aaaaaaaaaaaaaaaaaaagtagaaacttctgccttgctttgagctgcccctttctggacgtttctcatcagtagagaatattcctgccac
cctatcagacaaaactcccactggtttggagtctctccattctcaggaacacctcaggagtcagacagtgagcagcagggagcaatgt
cttgacttgtaagccccttagcaaggctggttcatttgtttattaaaagcaggtgtgggtgaatttatgcaaatgagtatgcaaactagtgg
aacagcagaaggattgaatggatacaccaaaaataaccacaactgtttaagggaaaagggtccataataaatgtggggaacaaaaaa
caaataaatgtgatttttttta
SEQ ID NO: 8 - mouse PNPLA3 (367 aa; NCBI Ref. Seq. No. XP_006520409.1)
MEILMDLVRKARSRNIGTLHPFFNINKCIRDGLQESLPDNVHQVISGKVHISLTRVSD
GENVLVSEFHSKDEVVDALVCSCFIPLFSGLIPPSFRGERYVDGGVSDNVPVLDAKTT
ITVSPFYGEHDICPKVKSTNFFHVNITNLSLRLCTGNLQLLTRALFPSDVKVMGELCY
QGYLDAFRFLEENGICNGPQRSLSLSLVAPEACLENGKLVGDKVPVSLCFTDENIWET
LSPELSTALSEAIKDREGYLSKVCNLLPVRILSYIMLPCSLPVESAIAAVHRLVTWLPDI
QDDIQWLQWATSQVCARMTMCLLPSTSMRFLGQSQFLGLHCIKGLKTKGKAQLSLQ
HASSARTTARFGAQAVQTF
SEQ ID NO: 9 - DsiRNA 1 passenger (sense) strand
UCUGCAGGUCCUCUCAGAUCUUGUG
SEQ ID NO: 10 - DsiRNA 1 guide (antisense) strand
CACAAGAUCUGAGAGGACCUGCAGAGU
SEQ ID NO: 11 - DsiRNA 2 passenger (sense) strand
AGGUCCUCUCAGAUCUUGUGCGGAA
SEQ ID NO: 12 - DsiRNA 2 guide (antisense) strand
UUCCGCACAAGAUCUGAGAGGACCUGC
SEQ ID NO: 13 - DsiRNA 3 passenger (sense) strand
AUUGGCAUCUUCCAUCCAUCCUUCA
SEQ ID NO: 14 - DsiRNA 3 guide (antisense) strand
UGAAGGAUGGAUGGAAGAUGCCAAUGU
SEQ ID NO: 15 - DsiRNA 4 passenger (sense) strand
AUCUUCCAUCCAUCCUUCAACUUAA
SEQ ID NO: 16 - DsiRNA 4 guide (antisense) strand
UUAAGUUGAAGGAUGGAUGGAAGAUGC
SEQ ID NO: 17 - DsiRNA 5 passenger (sense) strand
UCUUCCAUCCAUCCUUCAACUUAAG
SEQ ID NO: 18 - DsiRNA 5 guide (antisense) strand
CUUAAGUUGAAGGAUGGAUGGAAGAUG
SEQ ID NO: 19 - DsiRNA 6 passenger (sense) strand
CCAGAGUGUCUGAUGGGGAAAACGU
SEQ ID NO: 20 - DsiRNA 6 guide (antisense) strand
ACGUUUUCCCCAUCAGACACUCUGGUA
SEQ ID NO: 21 - DsiRNA 7 passenger (sense) strand
GAGUGUCUGAUGGGGAAAACGUUCU
SEQ ID NO: 22 - DsiRNA 7 guide (antisense) strand
AGAACGUUUUCCCCAUCAGACACUCUG
SEQ ID NO: 23 - DsiRNA 8 passenger (sense) strand
AUGGGGAAAACGUUCUGGUGUCUGA
SEQ ID NO: 24 - DsiRNA 8 guide (antisense) strand
UCAGACACCAGAACGUUUUCCCCAUCA
SEQ ID NO: 25 - DsiRNA 9 passenger (sense) strand
GGGGAAAACGUUCUGGUGUCUGACU
SEQ ID NO: 26 - DsiRNA 9 guide (antisense) strand
AGUCAGACACCAGAACGUUUUCCCCAU
SEQ ID NO: 27 - DsiRNA 10 passenger (sense) strand
GGGAAAACGUUCUGGUGUCUGACUU
SEQ ID NO: 28 - DsiRNA 10 guide (antisense) strand
AAGUCAGACACCAGAACGUUUUCCCCA
SEQ ID NO: 29 - DsiRNA 11 passenger (sense) strand
GGAAAACGUUCUGGUGUCUGACUUU
SEQ ID NO: 30 - DsiRNA 11 guide (antisense) strand
AAAGUCAGACACCAGAACGUUUUCCCC
SEQ ID NO: 31 - DsiRNA 12 passenger (sense) strand
GAAAACGUUCUGGUGUCUGACUUUC
SEQ ID NO: 32 - DsiRNA 12 guide (antisense) strand
GAAAGUCAGACACCAGAACGUUUUCCC
SEQ ID NO: 33 - DsiRNA 13 passenger (sense) strand
AAAACGUUCUGGUGUCUGACUUUCG
SEQ ID NO: 34 - DsiRNA 13 guide (antisense) strand
CGAAAGUCAGACACCAGAACGUUUUCC
SEQ ID NO: 35 - DsiRNA 14 passenger (sense) strand
AAACGUUCUGGUGUCUGACUUUCGG
SEQ ID NO: 36 - DsiRNA 14 guide (antisense) strand
CCGAAAGUCAGACACCAGAACGUUUUC
SEQ ID NO: 37 - DsiRNA 15 passenger (sense) strand
AACGUUCUGGUGUCUGACUUUCGGU
SEQ ID NO: 38 - DsiRNA 15 guide (antisense) strand
ACCGAAAGUCAGACACCAGAACGUUUU
SEQ ID NO: 39 - DsiRNA 16 passenger (sense) strand
ACGUUCUGGUGUCUGACUUUCGGUC
SEQ ID NO: 40 - DsiRNA 16 guide (antisense) strand
GACCGAAAGUCAGACACCAGAACGUUU
SEQ ID NO: 41 - DsiRNA 17 passenger (sense) strand
GUUCUGGUGUCUGACUUUCGGUCCA
SEQ ID NO: 42 - DsiRNA 17 guide (antisense) strand
UGGACCGAAAGUCAGACACCAGAACGU
SEQ ID NO: 43 - DsiRNA 18 passenger (sense) strand
GACGAAGUCGUGGAUGCCUUGGUAU
SEQ ID NO: 44 - DsiRNA 18 guide (antisense) strand
AUACCAAGGCAUCCACGACUUCGUCUU
SEQ ID NO: 45 - DsiRNA 19 passenger (sense) strand
ACGAAGUCGUGGAUGCCUUGGUAUG
SEQ ID NO: 46 - DsiRNA 19 guide (antisense) strand
CAUACCAAGGCAUCCACGACUUCGUCU
SEQ ID NO: 47 - DsiRNA 20 passenger (sense) strand
CGAAGUCGUGGAUGCCUUGGUAUGU
SEQ ID NO: 48 - DsiRNA 20 guide (antisense) strand
ACAUACCAAGGCAUCCACGACUUCGUC
SEQ ID NO: 49 - DsiRNA 21 passenger (sense) strand
CAGAGGCGUGCGAUAUGUGGAUGGA
SEQ ID NO: 50 - DsiRNA 21 guide (antisense) strand
UCCAUCCACAUAUCGCACGCCUCUGAA
SEQ ID NO: 51 - DsiRNA 22 passenger (sense) strand
GCGAUAUGUGGAUGGAGGAGUGAGU
SEQ ID NO: 52 - DsiRNA 22 guide (antisense) strand
ACUCACUCCUCCAUCCACAUAUCGCAC
SEQ ID NO: 53 - DsiRNA 23 passenger (sense) strand
GAUGGAGGAGUGAGUGACAACGUAC
SEQ ID NO: 54 - DsiRNA 23 guide (antisense) strand
GUACGUUGUCACUCACUCCUCCAUCCA
SEQ ID NO: 55 - DsiRNA 24 passenger (sense) strand
GAGGAGUGAGUGACAACGUACCCUU
SEQ ID NO: 56 - DsiRNA 24 guide (antisense) strand
AAGGGUACGUUGUCACUCACUCCUCCA
SEQ ID NO: 57 - DsiRNA 25 passenger (sense) strand
GAGUGAGUGACAACGUACCCUUCAU
SEQ ID NO: 58 - DsiRNA 25 guide (antisense) strand
AUGAAGGGUACGUUGUCACUCACUCCU
SEQ ID NO: 59 - DsiRNA 26 passenger (sense) strand
AGUGAGUGACAACGUACCCUUCAUU
SEQ ID NO: 60 - DsiRNA 26 guide (antisense) strand
AAUGAAGGGUACGUUGUCACUCACUCC
SEQ ID NO: 61 - DsiRNA 27 passenger (sense) strand
GUGAGUGACAACGUACCCUUCAUUG
SEQ ID NO: 62 - DsiRNA 27 guide (antisense) strand
CAAUGAAGGGUACGUUGUCACUCACUC
SEQ ID NO: 63 - DsiRNA 28 passenger (sense) strand
UGAGUGACAACGUACCCUUCAUUGA
SEQ ID NO: 64 - DsiRNA 28 guide (antisense) strand
UCAAUGAAGGGUACGUUGUCACUCACU
SEQ ID NO: 65 - DsiRNA 29 passenger (sense) strand
GAGUGACAACGUACCCUUCAUUGAU
SEQ ID NO: 66 - DsiRNA 29 guide (antisense) strand
AUCAAUGAAGGGUACGUUGUCACUCAC
SEQ ID NO: 67 - DsiRNA 30 passenger (sense) strand
AGUGACAACGUACCCUUCAUUGAUG
SEQ ID NO: 68 - DsiRNA 30 guide (antisense) strand
CAUCAAUGAAGGGUACGUUGUCACUCA
SEQ ID NO: 69 - DsiRNA 31 passenger (sense) strand
GUGACAACGUACCCUUCAUUGAUGC
SEQ ID NO: 70 - DsiRNA 31 guide (antisense) strand
GCAUCAAUGAAGGGUACGUUGUCACUC
SEQ ID NO: 71 - DsiRNA 32 passenger (sense) strand
UGACAACGUACCCUUCAUUGAUGCC
SEQ ID NO: 72 - DsiRNA 32 guide (antisense) strand
GGCAUCAAUGAAGGGUACGUUGUCACU
SEQ ID NO: 73 - DsiRNA 33 passenger (sense) strand
GACAACGUACCCUUCAUUGAUGCCA
SEQ ID NO: 74 - DsiRNA 33 guide (antisense) strand
UGGCAUCAAUGAAGGGUACGUUGUCAC
SEQ ID NO: 75 - DsiRNA 34 passenger (sense) strand
CAACGUACCCUUCAUUGAUGCCAAA
SEQ ID NO: 76 - DsiRNA 34 guide (antisense) strand
UUUGGCAUCAAUGAAGGGUACGUUGUC
SEQ ID NO: 77 - DsiRNA 35 passenger (sense) strand
AACGUACCCUUCAUUGAUGCCAAAA
SEQ ID NO: 78 - DsiRNA 35 guide (antisense) strand
UUUUGGCAUCAAUGAAGGGUACGUUGU
SEQ ID NO: 79 - DsiRNA 36 passenger (sense) strand
ACGUACCCUUCAUUGAUGCCAAAAC
SEQ ID NO: 80 - DsiRNA 36 guide (antisense) strand
GUUUUGGCAUCAAUGAAGGGUACGUUG
SEQ ID NO: 81 - DsiRNA 37 passenger (sense) strand
CGUACCCUUCAUUGAUGCCAAAACA
SEQ ID NO: 82 - DsiRNA 37 guide (antisense) strand
UGUUUUGGCAUCAAUGAAGGGUACGUU
SEQ ID NO: 83 - DsiRNA 38 passenger (sense) strand
UACCCUUCAUUGAUGCCAAAACAAC
SEQ ID NO: 84 - DsiRNA 38 guide (antisense) strand
GUUGUUUUGGCAUCAAUGAAGGGUACG
SEQ ID NO: 85 - DsiRNA 39 passenger (sense) strand
UUGAUGCCAAAACAACCAUCACCGU
SEQ ID NO: 86 - DsiRNA 39 guide (antisense) strand
ACGGUGAUGGUUGUUUUGGCAUCAAUG
SEQ ID NO: 87 - DsiRNA 40 passenger (sense) strand
GAUGCCAAAACAACCAUCACCGUGU
SEQ ID NO: 88 - DsiRNA 40 guide (antisense) strand
ACACGGUGAUGGUUGUUUUGGCAUCAA
SEQ ID NO: 89 - DsiRNA 41 passenger (sense) strand
AUGGGGAGUACGACAUCUGCCCUAA
SEQ ID NO: 90 - DsiRNA 41 guide (antisense) strand
UUAGGGCAGAUGUCGUACUCCCCAUAG
SEQ ID NO: 91 - DsiRNA 42 passenger (sense) strand
GUACGACAUCUGCCCUAAAGUCAAG
SEQ ID NO: 92 - DsiRNA 42 guide (antisense) strand
CUUGACUUUAGGGCAGAUGUCGUACUC
SEQ ID NO: 93 - DsiRNA 43 passenger (sense) strand
GACAUCUGCCCUAAAGUCAAGUCCA
SEQ ID NO: 94 - DsiRNA 43 guide (antisense) strand
UGGACUUGACUUUAGGGCAGAUGUCGU
SEQ ID NO: 95 - DsiRNA 44 passenger (sense) strand
ACAUCUGCCCUAAAGUCAAGUCCAC
SEQ ID NO: 96 - DsiRNA 44 guide (sense) strand
GUGGACUUGACUUUAGGGCAGAUGUCG
SEQ ID NO: 97 - DsiRNA 45 passenger (sense) strand
GUCAAGUCCACGAACUUUCUUCAUG
SEQ ID NO: 98 - DsiRNA 45 guide (antisense) strand
CAUGAAGAAAGUUCGUGGACUUGACUU
SEQ ID NO: 99 - DsiRNA 46 passenger (sense) strand
UCAAGUCCACGAACUUUCUUCAUGU
SEQ ID NO: 100 - DsiRNA 46 guide (antisense) strand
ACAUGAAGAAAGUUCGUGGACUUGACU
SEQ ID NO: 101 - DsiRNA 47 passenger (sense) strand
CAAGUCCACGAACUUUCUUCAUGUG
SEQ ID NO: 102 - DsiRNA 47 guide (antisense) strand
CACAUGAAGAAAGUUCGUGGACUUGAC
SEQ ID NO: 103 - DsiRNA 48 passenger (sense) strand
GUCCACGAACUUUCUUCAUGUGGAC
SEQ ID NO: 104 - DsiRNA 48 guide (antisense) strand
GUCCACAUGAAGAAAGUUCGUGGACUU
SEQ ID NO: 105 - DsiRNA 49 passenger (sense) strand
CCACGAACUUUCUUCAUGUGGACAU
SEQ ID NO: 106 - DsiRNA 49 guide (antisense) strand
AUGUCCACAUGAAGAAAGUUCGUGGAC
SEQ ID NO: 107 - DsiRNA 50 passenger (sense) strand
CACGAACUUUCUUCAUGUGGACAUC
SEQ ID NO: 108 - DsiRNA 50 guide (antisense) strand
GAUGUCCACAUGAAGAAAGUUCGUGGA
SEQ ID NO: 109 - DsiRNA 51 passenger (sense) strand
ACGAACUUUCUUCAUGUGGACAUCA
SEQ ID NO: 110 - DsiRNA 51 guide (antisense) strand
UGAUGUCCACAUGAAGAAAGUUCGUGG
SEQ ID NO: 111 - DsiRNA 52 passenger (sense) strand
CGAACUUUCUUCAUGUGGACAUCAC
SEQ ID NO: 112 - DsiRNA 52 guide (antisense) strand
GUGAUGUCCACAUGAAGAAAGUUCGUG
SEQ ID NO: 113 - DsiRNA 53 passenger (sense) strand
GAACUUUCUUCAUGUGGACAUCACC
SEQ ID NO: 114 - DsiRNA 53 guide (antisense) strand
GGUGAUGUCCACAUGAAGAAAGUUCGU
SEQ ID NO: 115 - DsiRNA 54 passenger (sense) strand
AACUUUCUUCAUGUGGACAUCACCA
SEQ ID NO: 116 - DsiRNA 54 guide (antisense) strand
UGGUGAUGUCCACAUGAAGAAAGUUCG
SEQ ID NO: 117 - DsiRNA 55 passenger (sense) strand
ACUUUCUUCAUGUGGACAUCACCAA
SEQ ID NO: 118 - DsiRNA 55 guide (antisense) strand
UUGGUGAUGUCCACAUGAAGAAAGUUC
SEQ ID NO: 119 - DsiRNA 56 passenger (sense) strand
CUUUCUUCAUGUGGACAUCACCAAG
SEQ ID NO: 120 - DsiRNA 56 guide (antisense) strand
CUUGGUGAUGUCCACAUGAAGAAAGUU
SEQ ID NO: 121 - DsiRNA 57 passenger (sense) strand
UUUCUUCAUGUGGACAUCACCAAGC
SEQ ID NO: 122 - DsiRNA 57 guide (antisense) strand
GCUUGGUGAUGUCCACAUGAAGAAAGU
SEQ ID NO: 123 - DsiRNA 58 passenger (sense) strand
UUCUUCAUGUGGACAUCACCAAGCU
SEQ ID NO: 124 - DsiRNA 58 guide (antisense) strand
AGCUUGGUGAUGUCCACAUGAAGAAAG
SEQ ID NO: 125 - DsiRNA 59 passenger (sense) strand
CUUCAUGUGGACAUCACCAAGCUCA
SEQ ID NO: 126 - DsiRNA 59 guide (antisense) strand
UGAGCUUGGUGAUGUCCACAUGAAGAA
SEQ ID NO: 127 - DsiRNA 60 passenger (sense) strand
UUCAUGUGGACAUCACCAAGCUCAG
SEQ ID NO: 128 - DsiRNA 60 guide (antisense) strand
CUGAGCUUGGUGAUGUCCACAUGAAGA
SEQ ID NO: 129 - DsiRNA 61 passenger (sense) strand
UCAUGUGGACAUCACCAAGCUCAGU
SEQ ID NO: 130 - DsiRNA 61 guide (antisense) strand
ACUGAGCUUGGUGAUGUCCACAUGAAG
SEQ ID NO: 131 - DsiRNA 62 passenger (sense) strand
CAUGUGGACAUCACCAAGCUCAGUC
SEQ ID NO: 132 - DsiRNA 62 guide (antisense) strand
GACUGAGCUUGGUGAUGUCCACAUGAA
SEQ ID NO: 133 - DsiRNA 63 passenger (sense) strand
AUGUGGACAUCACCAAGCUCAGUCU
SEQ ID NO: 134 - DsiRNA 63 guide (antisense) strand
AGACUGAGCUUGGUGAUGUCCACAUGA
SEQ ID NO: 135 - DsiRNA 64 passenger (sense) strand
UGUGGACAUCACCAAGCUCAGUCUA
SEQ ID NO: 136 - DsiRNA 64 guide (antisense) strand
UAGACUGAGCUUGGUGAUGUCCACAUG
SEQ ID NO: 137 - DsiRNA 65 passenger (sense) strand
GUGGACAUCACCAAGCUCAGUCUAC
SEQ ID NO: 138 - DsiRNA 65 guide (antisense) strand
GUAGACUGAGCUUGGUGAUGUCCACAU
SEQ ID NO: 139 - DsiRNA 66 passenger (sense) strand
UGGACAUCACCAAGCUCAGUCUACG
SEQ ID NO: 140 - DsiRNA 66 guide (antisense) strand
CGUAGACUGAGCUUGGUGAUGUCCACA
SEQ ID NO: 141 - DsiRNA 67 passenger (sense) strand
AGCUUUUGUCCCCCCGGAUCUCAAG
SEQ ID NO: 142 - DsiRNA 67 guide (antisense) strand
CUUGAGAUCCGGGGGGACAAAAGCUCU
SEQ ID NO: 143 - DsiRNA 68 passenger (sense) strand
AAGGUGCUGGGAGAGAUAUGCCUUC
SEQ ID NO: 144 - DsiRNA 68 guide (antisense) strand
GAAGGCAUAUCUCUCCCAGCACCUUGA
SEQ ID NO: 145 - DsiRNA 69 passenger (sense) strand
GGGAGAGAUAUGCCUUCGAGGAUAU
SEQ ID NO: 146 - DsiRNA 69 guide (antisense) strand
AUAUCCUCGAAGGCAUAUCUCUCCCAG
SEQ ID NO: 147 - DsiRNA 70 passenger (sense) strand
GGAGAGAUAUGCCUUCGAGGAUAUU
SEQ ID NO: 148 - DsiRNA 70 guide (antisense) strand
AAUAUCCUCGAAGGCAUAUCUCUCCCA
SEQ ID NO: 149 - DsiRNA 71 passenger (sense) strand
AGAGAUAUGCCUUCGAGGAUAUUUG
SEQ ID NO: 150 - DsiRNA 71 guide (antisense) strand
CAAAUAUCCUCGAAGGCAUAUCUCUCC
SEQ ID NO: 151 - DsiRNA 72 passenger (sense) strand
GAGAUAUGCCUUCGAGGAUAUUUGG
SEQ ID NO: 152 - DsiRNA 72 guide (antisense) strand
CCAAAUAUCCUCGAAGGCAUAUCUCUC
SEQ ID NO: 153 - DsiRNA 73 passenger (sense) strand
AGAUAUGCCUUCGAGGAUAUUUGGA
SEQ ID NO: 154 - DsiRNA 73 guide (antisense) strand
UCCAAAUAUCCUCGAAGGCAUAUCUCU
SEQ ID NO: 155 - DsiRNA 74 passenger (sense) strand
GAUAUGCCUUCGAGGAUAUUUGGAU
SEQ ID NO: 156 - DsiRNA 74 guide (antisense) strand
AUCCAAAUAUCCUCGAAGGCAUAUCUC
SEQ ID NO: 157 - DsiRNA 75 passenger (sense) strand
AUAUGCCUUCGAGGAUAUUUGGAUG
SEQ ID NO: 158 - DsiRNA 75 guide (antisense) strand
CAUCCAAAUAUCCUCGAAGGCAUAUCU
SEQ ID NO: 159 - DsiRNA 76 passenger (sense) strand
AUGCCUUCGAGGAUAUUUGGAUGCA
SEQ ID NO: 160 - DsiRNA 76 guide (antisense) strand
UGCAUCCAAAUAUCCUCGAAGGCAUAU
SEQ ID NO: 161 - DsiRNA 77 passenger (sense) strand
UGCCUUCGAGGAUAUUUGGAUGCAU
SEQ ID NO: 162 - DsiRNA 77 guide (antisense) strand
AUGCAUCCAAAUAUCCUCGAAGGCAUA
SEQ ID NO: 163 - DsiRNA 78 passenger (sense) strand
GCCUUCGAGGAUAUUUGGAUGCAUU
SEQ ID NO: 164 - DsiRNA 78 guide (antisense) strand
AAUGCAUCCAAAUAUCCUCGAAGGCAU
SEQ ID NO: 165 - DsiRNA 79 passenger (sense) strand
UCAGGUUCUUGGAAGAGAAGGGCAU
SEQ ID NO: 166 - DsiRNA 79 guide (antisense) strand
AUGCCCUUCUCUUCCAAGAACCUGAAU
SEQ ID NO: 167 - DsiRNA 80 passenger (sense) strand
CAGGUUCUUGGAAGAGAAGGGCAUC
SEQ ID NO: 168 - DsiRNA 80 guide (antisense) strand
GAUGCCCUUCUCUUCCAAGAACCUGAA
SEQ ID NO: 169 - DsiRNA 81 passenger (sense) strand
AGGUUCUUGGAAGAGAAGGGCAUCU
SEQ ID NO: 170 - DsiRNA 81 guide (antisense) strand
AGAUGCCCUUCUCUUCCAAGAACCUGA
SEQ ID NO: 171 - DsiRNA 82 passenger (sense) strand
GGUUCUUGGAAGAGAAGGGCAUCUG
SEQ ID NO: 172 - DsiRNA 82 guide (antisense) strand
CAGAUGCCCUUCUCUUCCAAGAACCUG
SEQ ID NO: 173 - DsiRNA 83 passenger (sense) strand
UGGAAGAGAAGGGCAUCUGCAACAG
SEQ ID NO: 174 - DsiRNA 83 guide (antisense) strand
CUGUUGCAGAUGCCCUUCUCUUCCAAG
SEQ ID NO: 175 - DsiRNA 84 passenger (sense) strand
UGAAGUCAUCCUCAGAAGGGAUGGA
SEQ ID NO: 176 - DsiRNA 84 guide (antisense) strand
UCCAUCCCUUCUGAGGAUGACUUCAGG
SEQ ID NO: 177 - DsiRNA 85 passenger (sense) strand
GAAGUCAUCCUCAGAAGGGAUGGAU
SEQ ID NO: 178 - DsiRNA 85 guide (antisense) strand
AUCCAUCCCUUCUGAGGAUGACUUCAG
SEQ ID NO: 179 - DsiRNA 86 passenger (sense) strand
AAGUCAUCCUCAGAAGGGAUGGAUC
SEQ ID NO: 180 - DsiRNA 86 guide (antisense) strand
GAUCCAUCCCUUCUGAGGAUGACUUCA
SEQ ID NO: 181 - DsiRNA 87 passenger (sense) strand
GUCAUCCUCAGAAGGGAUGGAUCCU
SEQ ID NO: 182 - DsiRNA 87 guide (antisense) strand
AGGAUCCAUCCCUUCUGAGGAUGACUU
SEQ ID NO: 183 - DsiRNA 88 passenger (sense) strand
CAUCCUCAGAAGGGAUGGAUCCUGA
SEQ ID NO: 184 - DsiRNA 88 guide (antisense) strand
UCAGGAUCCAUCCCUUCUGAGGAUGAC
SEQ ID NO: 185 - DsiRNA 89 passenger (sense) strand
AUCCUCAGAAGGGAUGGAUCCUGAG
SEQ ID NO: 186 - DsiRNA 89 guide (antisense) strand)
CUCAGGAUCCAUCCCUUCUGAGGAUGA
SEQ ID NO: 187 - DsiRNA 90 passenger (sense) strand
CUAGACCACCUGCGUCUCAGCAUCC
SEQ ID NO: 188 - DsiRNA 90 guide (antisense) strand
GGAUGCUGAGACGCAGGUGGUCUAGCA
SEQ ID NO: 189 - DsiRNA 91 passenger (sense) strand
AGUGAAGAAAUGAAAGACAAAGGUG
SEQ ID NO: 190 - DsiRNA 91 guide (antisense) strand
CACCUUUGUCUUUCAUUUCUUCACUCA
SEQ ID NO: 191 - DsiRNA 92 passenger (sense) strand
GUGAAGAAAUGAAAGACAAAGGUGG
SEQ ID NO: 192 - DsiRNA 92 guide (antisense) strand
CCACCUUUGUCUUUCAUUUCUUCACUC
SEQ ID NO: 193 - DsiRNA 93 passenger (sense) strand
UGAAGAAAUGAAAGACAAAGGUGGA
SEQ ID NO: 194 - DsiRNA 93 guide (antisense) strand
UCCACCUUUGUCUUUCAUUUCUUCACU
SEQ ID NO: 195 - DsiRNA 94 passenger (sense) strand
GAAGAAAUGAAAGACAAAGGUGGAU
SEQ ID NO: 196 - DsiRNA 94 guide (antisense) strand
AUCCACCUUUGUCUUUCAUUUCUUCAC
SEQ ID NO: 197 - DsiRNA 95 passenger (sense) strand
AAGAAAUGAAAGACAAAGGUGGAUA
SEQ ID NO: 198 - DsiRNA 95 guide (antisense) strand
UAUCCACCUUUGUCUUUCAUUUCUUCA
SEQ ID NO: 199 - DsiRNA 96 passenger (sense) strand
AGAAAUGAAAGACAAAGGUGGAUAC
SEQ ID NO: 200 - DsiRNA 96 guide (antisense) strand
GUAUCCACCUUUGUCUUUCAUUUCUUC
SEQ ID NO: 201 - DsiRNA 97 passenger (sense) strand
GAAAUGAAAGACAAAGGUGGAUACA
SEQ ID NO: 202 - DsiRNA 97 guide (antisense) strand
UGUAUCCACCUUUGUCUUUCAUUUCUU
SEQ ID NO: 203 - DsiRNA 98 passenger (sense) strand
AAAUGAAAGACAAAGGUGGAUACAU
SEQ ID NO: 204 - DsiRNA 98 guide (antisense) strand
AUGUAUCCACCUUUGUCUUUCAUUUCU
SEQ ID NO: 205 - DsiRNA 99 passenger (sense) strand
AAUGAAAGACAAAGGUGGAUACAUG
SEQ ID NO: 206 - DsiRNA 99 guide (antisense) strand
CAUGUAUCCACCUUUGUCUUUCAUUUC
SEQ ID NO: 207 - DsiRNA 100 passenger (sense) strand
AUGAAAGACAAAGGUGGAUACAUGA
SEQ ID NO: 208 - DsiRNA 100 guide (antisense) strand
UCAUGUAUCCACCUUUGUCUUUCAUUU
SEQ ID NO: 209 - DsiRNA 101 passenger (sense) strand
UGAAAGACAAAGGUGGAUACAUGAG
SEQ ID NO: 210 - DsiRNA 101 guide (antisense) strand
CUCAUGUAUCCACCUUUGUCUUUCAUU
SEQ ID NO: 211 - DsiRNA 102 passenger (sense) strand
GAAAGACAAAGGUGGAUACAUGAGC
SEQ ID NO: 212 - DsiRNA 102 guide (antisense) strand
GCUCAUGUAUCCACCUUUGUCUUUCAU
SEQ ID NO: 213 - DsiRNA 103 passenger (sense) strand
AAGACAAAGGUGGAUACAUGAGCAA
SEQ ID NO: 214 - DsiRNA 103 guide (antisense) strand
UUGCUCAUGUAUCCACCUUUGUCUUUC
SEQ ID NO: 215 - DsiRNA 104 passenger (sense) strand
AGACAAAGGUGGAUACAUGAGCAAG
SEQ ID NO: 216 - DsiRNA 104 guide (antisense) strand
CUUGCUCAUGUAUCCACCUUUGUCUUU
SEQ ID NO: 217 - DsiRNA 105 passenger (sense) strand
GACAAAGGUGGAUACAUGAGCAAGA
SEQ ID NO: 218 - DsiRNA 105 guide (antisense) strand
UCUUGCUCAUGUAUCCACCUUUGUCUU
SEQ ID NO: 219 - DsiRNA 106 passenger (sense) strand
ACAAAGGUGGAUACAUGAGCAAGAU
SEQ ID NO: 220 - DsiRNA 106 guide (antisense) strand
AUCUUGCUCAUGUAUCCACCUUUGUCU
SEQ ID NO: 221 - DsiRNA 107 passenger (sense) strand
AAGGUGGAUACAUGAGCAAGAUUUG
SEQ ID NO: 222 - DsiRNA 107 guide (antisense) strand
CAAAUCUUGCUCAUGUAUCCACCUUUG
SEQ ID NO: 223 - DsiRNA 108 passenger (sense) strand
AGGUGGAUACAUGAGCAAGAUUUGC
SEQ ID NO: 224 - DsiRNA 108 guide (antisense) strand
GCAAAUCUUGCUCAUGUAUCCACCUUU
SEQ ID NO: 225 - DsiRNA 109 passenger (sense) strand
UGGAUACAUGAGCAAGAUUUGCAAC
SEQ ID NO: 226 - DsiRNA 109 guide (antisense) strand
GUUGCAAAUCUUGCUCAUGUAUCCACC
SEQ ID NO: 227 - DsiRNA 110 passenger (sense) strand
GGAUACAUGAGCAAGAUUUGCAACU
SEQ ID NO: 228 - DsiRNA 110 guide (antisense) strand
AGUUGCAAAUCUUGCUCAUGUAUCCAC
SEQ ID NO: 229 - DsiRNA 111 passenger (sense) strand
GAUACAUGAGCAAGAUUUGCAACUU
SEQ ID NO: 230 - DsiRNA 111 guide (antisense) strand
AAGUUGCAAAUCUUGCUCAUGUAUCCA
SEQ ID NO: 231 - DsiRNA 112 passenger (sense) strand
AUACAUGAGCAAGAUUUGCAACUUG
SEQ ID NO: 232 -DsiRNA 112 guide (antisense) strand
CAAGUUGCAAAUCUUGCUCAUGUAUCC
SEQ ID NO: 233 - DsiRNA 113 passenger (sense) strand
UACAUGAGCAAGAUUUGCAACUUGC
SEQ ID NO: 234 - DsiRNA 113 guide (antisense) strand
GCAAGUUGCAAAUCUUGCUCAUGUAUC
SEQ ID NO: 235 - DsiRNA 114 passenger (sense) strand
ACAUGAGCAAGAUUUGCAACUUGCU
SEQ ID NO: 236 - DsiRNA 114 guide (antisense) strand
AGCAAGUUGCAAAUCUUGCUCAUGUAU
SEQ ID NO: 237 - DsiRNA 115 passenger (sense) strand
CAUGAGCAAGAUUUGCAACUUGCUA
SEQ ID NO: 238 - DsiRNA 115 guide (antisense) strand
UAGCAAGUUGCAAAUCUUGCUCAUGUA
SEQ ID NO: 239: DsiRNA 116 passenger (sense) strand
AUGAGCAAGAUUUGCAACUUGCUAC
SEQ ID NO: 240 - DsiRNA 116 guide (antisense) strand
GUAGCAAGUUGCAAAUCUUGCUCAUGU
SEQ ID NO: 241 - DsiRNA 117 passenger (sense) strand
UGAGCAAGAUUUGCAACUUGCUACC
SEQ ID NO: 242 - DsiRNA 117 guide (antisense) strand
GGUAGCAAGUUGCAAAUCUUGCUCAUG
SEQ ID NO: 243 - DsiRNA 118 passenger (sense) strand
GAGCAAGAUUUGCAACUUGCUACCC
SEQ ID NO: 244 - DsiRNA 118 guide (antisense) strand
GGGUAGCAAGUUGCAAAUCUUGCUCAU
SEQ ID NO: 245 - DsiRNA 119 passenger (sense) strand
AGCAAGAUUUGCAACUUGCUACCCA
SEQ ID NO: 246 - DsiRNA 119 guide (antisense) strand
UGGGUAGCAAGUUGCAAAUCUUGCUCA
SEQ ID NO: 247 - DsiRNA 120 passenger (sense) strand
GCAAGAUUUGCAACUUGCUACCCAU
SEQ ID NO: 248 - DsiRNA 120 guide (antisense) strand
AUGGGUAGCAAGUUGCAAAUCUUGCUC
SEQ ID NO: 249 - DsiRNA 121 passenger (sense) strand
CAAGAUUUGCAACUUGCUACCCAUU
SEQ ID NO: 250 - DsiRNA 121 guide (antisense) strand
AAUGGGUAGCAAGUUGCAAAUCUUGCU
SEQ ID NO: 251 - DsiRNA 122 passenger (sense) strand
AAGAUUUGCAACUUGCUACCCAUUA
SEQ ID NO: 252 - DsiRNA 122 guide (antisense) strand
UAAUGGGUAGCAAGUUGCAAAUCUUGC
SEQ ID NO: 253 - DsiRNA 123 passenger (sense) strand
AGAUUUGCAACUUGCUACCCAUUAG
SEQ ID NO: 254 - DsiRNA 123 guide (antisense) strand
CUAAUGGGUAGCAAGUUGCAAAUCUUG
SEQ ID NO: 255 - DsiRNA 124 passenger (sense) strand
GAUUUGCAACUUGCUACCCAUUAGG
SEQ ID NO: 256 - DsiRNA 124 guide (antisense) strand
CCUAAUGGGUAGCAAGUUGCAAAUCUU
SEQ ID NO: 257 - DsiRNA 125 passenger (sense) strand
AUUUGCAACUUGCUACCCAUUAGGA
SEQ ID NO: 258 - DsiRNA 125 guide (antisense) strand
UCCUAAUGGGUAGCAAGUUGCAAAUCU
SEQ ID NO: 259 - DsiRNA 126 passenger (sense) strand
UUUGCAACUUGCUACCCAUUAGGAU
SEQ ID NO: 260 - DsiRNA 126 guide (antisense) strand
AUCCUAAUGGGUAGCAAGUUGCAAAUC
SEQ ID NO: 261 - DsiRNA 127 passenger (sense) strand
UUGCAACUUGCUACCCAUUAGGAUA
SEQ ID NO: 262 - DsiRNA 127 guide (antisense) strand
UAUCCUAAUGGGUAGCAAGUUGCAAAU
SEQ ID NO: 263 - DsiRNA 128 passenger (sense) strand
UGCAACUUGCUACCCAUUAGGAUAA
SEQ ID NO: 264 - DsiRNA 128 guide (antisense) strand
UUAUCCUAAUGGGUAGCAAGUUGCAAA
SEQ ID NO: 265 - DsiRNA 129 - passenger (sense) strand
GCAACUUGCUACCCAUUAGGAUAAU
SEQ ID NO: 266 - DsiRNA 129 guide (antisense) strand
AUUAUCCUAAUGGGUAGCAAGUUGCAA
SEQ ID NO: 267 - DsiRNA 130 passenger (sense) strand
CAACUUGCUACCCAUUAGGAUAAUG
SEQ ID NO: 268 - DsiRNA 130 guide (antisense) strand
CAUUAUCCUAAUGGGUAGCAAGUUGCA
SEQ ID NO: 269 - DsiRNA 131 passenger (sense) strand
CUUGCUACCCAUUAGGAUAAUGUCU
SEQ ID NO: 270 - DsiRNA 131 guide (antisense) strand
AGACAUUAUCCUAAUGGGUAGCAAGUU
SEQ ID NO: 271 - DsiRNA 132 passenger (sense) strand
UUGCUACCCAUUAGGAUAAUGUCUU
SEQ ID NO: 272 - DsiRNA 132 guide (antisense) strand
AAGACAUUAUCCUAAUGGGUAGCAAGU
SEQ ID NO: 273 - DsiRNA 133 passenger (sense) strand
UGCUACCCAUUAGGAUAAUGUCUUA
SEQ ID NO: 274 - DsiRNA 133 guide (antisense) strand
UAAGACAUUAUCCUAAUGGGUAGCAAG
SEQ ID NO: 275 - DsiRNA 134 passenger (sense) strand
AUUAGGAUAAUGUCUUAUGUAAUGC
SEQ ID NO: 276 - DsiRNA 134 guide (antisense) strand
GCAUUACAUAAGACAUUAUCCUAAUGG
SEQ ID NO: 277 - DsiRNA 135 passenger (sense) strand
UUAGGAUAAUGUCUUAUGUAAUGCU
SEQ ID NO: 278 - DsiRNA 135 guide (antisense) strand
AGCAUUACAUAAGACAUUAUCCUAAUG
SEQ ID NO: 279 - DsiRNA 136 passenger (sense) strand
CUGUGGAAUCUGCCAUUGCGAUUGU
SEQ ID NO: 280 - DsiRNA 136 guide (antisense) strand
ACAAUCGCAAUGGCAGAUUCCACAGGC
SEQ ID NO: 281 - DsiRNA 137 passenger (sense) strand
GGAAUCUGCCAUUGCGAUUGUCCAG
SEQ ID NO: 282 - DsiRNA 137 guide (antisense) strand
CUGGACAAUCGCAAUGGCAGAUUCCAC
SEQ ID NO: 283 - DsiRNA 138 passenger (sense) strand
GAAUCUGCCAUUGCGAUUGUCCAGA
SEQ ID NO: 284 - DsiRNA 138 guide (antisense) strand
UCUGGACAAUCGCAAUGGCAGAUUCCA
SEQ ID NO: 285 - DsiRNA 139 passenger (sense) strand
AAUCUGCCAUUGCGAUUGUCCAGAG
SEQ ID NO: 286 - DsiRNA 139 guide (antisense) strand
CUCUGGACAAUCGCAAUGGCAGAUUCC
SEQ ID NO: 287 - DsiRNA 140 passenger (sense) strand
AUCUGCCAUUGCGAUUGUCCAGAGA
SEQ ID NO: 288 - DsiRNA 140 guide (antisense) strand
UCUCUGGACAAUCGCAAUGGCAGAUUC
SEQ ID NO: 289 - DsiRNA 141 passenger (sense) strand
CCAUUGCGAUUGUCCAGAGACUGGU
SEQ ID NO: 290 - DsiRNA 141 guide (antisense) strand
ACCAGUCUCUGGACAAUCGCAAUGGCA
SEQ ID NO: 291 - DsiRNA 142 passenger (sense) strand
CAUUGCGAUUGUCCAGAGACUGGUG
SEQ ID NO: 292 - DsiRNA 142 guide (antisense) strand
CACCAGUCUCUGGACAAUCGCAAUGGC
SEQ ID NO: 293 - DsiRNA 143 passenger (sense) strand
AUUGCGAUUGUCCAGAGACUGGUGA
SEQ ID NO: 294 - DsiRNA 143 guide (antisense) strand
UCACCAGUCUCUGGACAAUCGCAAUGG
SEQ ID NO: 295 - DsiRNA 144 passenger (sense) strand
UUGCGAUUGUCCAGAGACUGGUGAC
SEQ ID NO: 296 - DsiRNA 144 guide (antisense) strand
GUCACCAGUCUCUGGACAAUCGCAAUG
SEQ ID NO: 297 - DsiRNA 145 passenger (sense) strand
UGCGAUUGUCCAGAGACUGGUGACA
SEQ ID NO: 298 - DsiRNA 145 guide (antisense) strand
UGUCACCAGUCUCUGGACAAUCGCAAU
SEQ ID NO: 299 - DsiRNA 146 passenger (sense) strand
GCGAUUGUCCAGAGACUGGUGACAU
SEQ ID NO: 300 - DsiRNA 146 guide (antisense) strand
AUGUCACCAGUCUCUGGACAAUCGCAA
SEQ ID NO: 301 - DsiRNA 147 passenger (sense) strand
CGAUUGUCCAGAGACUGGUGACAUG
SEQ ID NO: 302 - DsiRNA 147 guide (antisense) strand
CAUGUCACCAGUCUCUGGACAAUCGCA
SEQ ID NO: 303 - DsiRNA 148 passenger (sense)
AUUGUCCAGAGACUGGUGACAUGGC
SEQ ID NO: 304 - DsiRNA 148 guide (antisense) strand
GCCAUGUCACCAGUCUCUGGACAAUCG
SEQ ID NO: 305 - DsiRNA 149 passenger (sense) strand
GUCCAGAGACUGGUGACAUGGCUUC
SEQ ID NO: 306 - DsiRNA 149 guide (antisense) strand
GAAGCCAUGUCACCAGUCUCUGGACAA
SEQ ID NO: 307 - DsiRNA 150 passenger (sense) strand
CCAGAGACUGGUGACAUGGCUUCCA
SEQ ID NO: 308 - DsiRNA 150 guide (antisense) strand
UGGAAGCCAUGUCACCAGUCUCUGGAC
SEQ ID NO: 309 - DsiRNA 151 passenger (sense)
CAGAGACUGGUGACAUGGCUUCCAG
SEQ ID NO: 310 - DsiRNA 151 guide (antisense) strand
CUGGAAGCCAUGUCACCAGUCUCUGGA
SEQ ID NO: 311 - DsiRNA 152 passenger (sense) strand
AGAGACUGGUGACAUGGCUUCCAGA
SEQ ID NO: 312 - DsiRNA 152 guide (antisense) strand
UCUGGAAGCCAUGUCACCAGUCUCUGG
SEQ ID NO: 313 - DsiRNA 153 passenger (sense) strand
GAGACUGGUGACAUGGCUUCCAGAU
SEQ ID NO: 314 - DsiRNA 153 guide (antisense) strand
AUCUGGAAGCCAUGUCACCAGUCUCUG
SEQ ID NO: 315 - DsiRNA 154 passenger (sense) strand
AGACUGGUGACAUGGCUUCCAGAUA
SEQ ID NO: 316 - DsiRNA 154 guide (antisense) strand
UAUCUGGAAGCCAUGUCACCAGUCUCU
SEQ ID NO: 317 - DsiRNA 155 passenger (sense) strand
GACUGGUGACAUGGCUUCCAGAUAU
SEQ ID NO: 318 - DsiRNA 155 guide (antisense) strand
AUAUCUGGAAGCCAUGUCACCAGUCUC
SEQ ID NO: 319 - DsiRNA 156 passenger (sense) strand
ACUGGUGACAUGGCUUCCAGAUAUG
SEQ ID NO: 320 - DsiRNA 156 guide (antisense) strand
CAUAUCUGGAAGCCAUGUCACCAGUCU
SEQ ID NO: 321 - DsiRNA 157 passenger (sense) strand
CUGGUGACAUGGCUUCCAGAUAUGC
SEQ ID NO: 322 - DsiRNA 157 guide (antisense) strand
GCAUAUCUGGAAGCCAUGUCACCAGUC
SEQ ID NO: 323 - DsiRNA 158 passenger (sense) strand
GACAUGGCUUCCAGAUAUGCCCGAC
SEQ ID NO: 324 - DsiRNA 158 guide (antisense) strand
GUCGGGCAUAUCUGGAAGCCAUGUCAC
SEQ ID NO: 325 - DsiRNA 159 passenger (sense) strand
CAUGGCUUCCAGAUAUGCCCGACGA
SEQ ID NO: 326 - DsiRNA 159 guide (antisense) strand
UCGUCGGGCAUAUCUGGAAGCCAUGUC
SEQ ID NO: 327 - DsiRNA 160 passenger (sense) strand
CAGAUAUGCCCGACGAUGUCCUGUG
SEQ ID NO: 328 - DsiRNA 160 guide (antisense) strand
CACAGGACAUCGUCGGGCAUAUCUGGA
SEQ ID NO: 329 - DsiRNA 161 passenger (sense) strand
CUCACAGGUGUUCACUCGAGUGCUG
SEQ ID NO: 330 - DsiRNA 161 guide (antisense) strand
CAGCACUCGAGUGAACACCUGUGAGGU
SEQ ID NO: 331 - DsiRNA 162 passenger (sense) strand
CACUCGAGUGCUGAUGUGUCUGCUC
SEQ ID NO: 332 - DsiRNA 162 guide (antisense) strand
GAGCAGACACAUCAGCACUCGAGUGAA
SEQ ID NO: 333 - DsiRNA 163 passenger (sense) strand
CUCGAGUGCUGAUGUGUCUGCUCCC
SEQ ID NO: 334 - DsiRNA 163 guide (antisense) strand
GGGAGCAGACACAUCAGCACUCGAGUG
SEQ ID NO: 335 - DsiRNA 164 passenger (sense) strand
CCCAAAUGCCAGUGAGCAGCCAACA
SEQ ID NO: 336 - DsiRNA 164 guide (antisense) strand
UGUUGGCUGCUCACUGGCAUUUGGGAC
SEQ ID NO: 337 - DsiRNA 165 passenger (sense) strand
UCAGGUCCAGCCUGAACUUCUUCUU
SEQ ID NO: 338 - DsiRNA 165 guide (antisense) strand
AAGAAGAAGUUCAGGCUGGACCUGAGG
SEQ ID NO: 339 - DsiRNA 166 passenger (sense) strand
CAGGUCCAGCCUGAACUUCUUCUUG
SEQ ID NO: 340 - DsiRNA 166 guide (antisense) strand
CAAGAAGAAGUUCAGGCUGGACCUGAG
SEQ ID NO: 341 - DsiRNA 167 passenger (sense) strand
AGGUCCAGCCUGAACUUCUUCUUGG
SEQ ID NO: 342 - DsiRNA 167 guide (antisense) strand
CCAAGAAGAAGUUCAGGCUGGACCUGA
SEQ ID NO: 343 - DsiRNA 168 passenger (sense) strand
CAAUAAAGUACCUGCUGGUGCUGAG
SEQ ID NO: 344 - DsiRNA 168 guide (antisense) strand
CUCAGCACCAGCAGGUACUUUAUUGCC
SEQ ID NO: 345 - DsiRNA 169 passenger (sense) strand
AAUAAAGUACCUGCUGGUGCUGAGG
SEQ ID NO: 346 - DsiRNA 169 guide (antisense) strand
CCUCAGCACCAGCAGGUACUUUAUUGC
SEQ ID NO: 347 - DsiRNA 170 passenger (sense) strand
AUAAAGUACCUGCUGGUGCUGAGGG
SEQ ID NO: 348 - DsiRNA 170 guide (antisense) strand
CCCUCAGCACCAGCAGGUACUUUAUUG
SEQ ID NO: 349 - DsiRNA 171 passenger (sense) strand
CUCUCCACCUUUCCCAGUUUUUCAC
SEQ ID NO: 350 - DsiRNA 171 guide (antisense) strand
GUGAAAAACUGGGAAAGGUGGAGAGCC
SEQ ID NO: 351 - DsiRNA 172 passenger (sense) strand
CUCCACCUUUCCCAGUUUUUCACUA
SEQ ID NO: 352 - DsiRNA 172 guide (antisense) strand
UAGUGAAAAACUGGGAAAGGUGGAGAG
SEQ ID NO: 353 - DsiRNA 173 passenger (sense) strand
UCCACCUUUCCCAGUUUUUCACUAG
SEQ ID NO: 354 - DsiRNA 173 guide (antisense) strand
CUAGUGAAAAACUGGGAAAGGUGGAGA
SEQ ID NO: 355 - DsiRNA 174 passenger (sense) strand
CCACCUUUCCCAGUUUUUCACUAGA
SEQ ID NO: 356 - DsiRNA 174 guide (antisense) strand
UCUAGUGAAAAACUGGGAAAGGUGGAG
SEQ ID NO: 357 - DsiRNA 175 passenger (sense) strand
CACCUUUCCCAGUUUUUCACUAGAG
SEQ ID NO: 358 - DsiRNA 175 guide (antisense) strand
CUCUAGUGAAAAACUGGGAAAGGUGGA
SEQ ID NO: 359 - DsiRNA 176 passenger (sense) strand
ACCUUUCCCAGUUUUUCACUAGAGA
SEQ ID NO: 360 - DsiRNA 176 guide (antisense) strand
UCUCUAGUGAAAAACUGGGAAAGGUGG
SEQ ID NO: 361 - DsiRNA 177 passenger (sense) strand
CCUUUCCCAGUUUUUCACUAGAGAA
SEQ ID NO: 362 - DsiRNA 177 guide (antisense) strand
UUCUCUAGUGAAAAACUGGGAAAGGUG
SEQ ID NO: 363 - DsiRNA 178 passenger (sense) strand
AGUUUUUCACUAGAGAAGAGUCUGU
SEQ ID NO: 364 - DsiRNA 178 guide (antisense) strand
ACAGACUCUUCUCUAGUGAAAAACUGG
SEQ ID NO: 365 - DsiRNA 179 passenger (sense) strand
UCUAGCAGAUUCUUUCAGAGGUGCU
SEQ ID NO: 366 - DsiRNA 179 guide (antisense) strand
AGCACCUCUGAAAGAAUCUGCUAGACU
SEQ ID NO: 367 - DsiRNA 180 passenger (sense) strand
AGCAGAUUCUUUCAGAGGUGCUAAA
SEQ ID NO: 368 - DsiRNA 180 guide (antisense) strand
UUUAGCACCUCUGAAAGAAUCUGCUAG
SEQ ID NO: 369 - DsiRNA 181 passenger (sense) strand
GCAGAUUCUUUCAGAGGUGCUAAAG
SEQ ID NO: 370 - DsiRNA 181 guide (antisense) strand
CUUUAGCACCUCUGAAAGAAUCUGCUA
SEQ ID NO: 371 - DsiRNA 182 passenger (sense) strand
CAGAUUCUUUCAGAGGUGCUAAAGU
SEQ ID NO: 372 - DsiRNA 182 guide (antisense) strand
ACUUUAGCACCUCUGAAAGAAUCUGCU
SEQ ID NO: 373 - DsiRNA 183 passenger (sense) strand
AGAUUCUUUCAGAGGUGCUAAAGUU
SEQ ID NO: 374 - DsiRNA 183 guide (antisense) strand
AACUUUAGCACCUCUGAAAGAAUCUGC
SEQ ID NO: 375 - DsiRNA 184 passenger (sense) strand
GAUUCUUUCAGAGGUGCUAAAGUUU
SEQ ID NO: 376 - DsiRNA 184 guide (antisense) strand
AAACUUUAGCACCUCUGAAAGAAUCUG
SEQ ID NO: 377 - DsiRNA 185 passenger (sense) strand
AUUCUUUCAGAGGUGCUAAAGUUUC
SEQ ID NO: 378 - DsiRNA 185 guide (antisense) strand
GAAACUUUAGCACCUCUGAAAGAAUCU
SEQ ID NO: 379 - DsiRNA 186 passenger (sense) strand
AGGUGCUAAAGUUUCCCAUCUUUGU
SEQ ID NO: 380 - DsiRNA 186 guide (antisense) strand
ACAAAGAUGGGAAACUUUAGCACCUCU
SEQ ID NO: 381 - DsiRNA 187 passenger (sense) strand
GGUGCUAAAGUUUCCCAUCUUUGUG
SEQ ID NO: 382 - DsiRNA 187 guide (antisense) strand
CACAAAGAUGGGAAACUUUAGCACCUC
SEQ ID NO: 383 - DsiRNA 188 passenger (sense) strand
GUGCUAAAGUUUCCCAUCUUUGUGC
SEQ ID NO: 384 - DsiRNA 188 guide (antisense) strand
GCACAAAGAUGGGAAACUUUAGCACCU
SEQ ID NO: 385 - DsiRNA 189 passenger (sense) strand
GCUAAAGUUUCCCAUCUUUGUGCAG
SEQ ID NO: 386 - DsiRNA 189 guide (antisense) strand
CUGCACAAAGAUGGGAAACUUUAGCAC
SEQ ID NO: 387 - DsiRNA 190 passenger (sense) strand
CUAAAGUUUCCCAUCUUUGUGCAGC
SEQ ID NO: 388 - DsiRNA 190 guide (antisense) strand
GCUGCACAAAGAUGGGAAACUUUAGCA
SEQ ID NO: 389 - DsiRNA 191 passenger (sense) strand
UAAAGUUUCCCAUCUUUGUGCAGCU
SEQ ID NO: 390 - DsiRNA 191 guide (antisense) strand
AGCUGCACAAAGAUGGGAAACUUUAGC
SEQ ID NO: 391 - DsiRNA 192 passenger (sense) strand
AAAGUUUCCCAUCUUUGUGCAGCUA
SEQ ID NO: 392 - DsiRNA 192 guide (antisense) strand
UAGCUGCACAAAGAUGGGAAACUUUAG
SEQ ID NO: 393 - DsiRNA 193 passenger (sense) strand
AAGUUUCCCAUCUUUGUGCAGCUAC
SEQ ID NO: 394 - DsiRNA 193 guide (antisense) strand
GUAGCUGCACAAAGAUGGGAAACUUUA
SEQ ID NO: 395 - DsiRNA 194 passenger (sense) strand
AGUUUCCCAUCUUUGUGCAGCUACC
SEQ ID NO: 396 - DsiRNA 194 guide (antisense) strand
GGUAGCUGCACAAAGAUGGGAAACUUU
SEQ ID NO: 397 - DsiRNA 195 passenger (sense) strand
GUUUCCCAUCUUUGUGCAGCUACCU
SEQ ID NO: 398 - DsiRNA 195 guide (antisense) strand
AGGUAGCUGCACAAAGAUGGGAAACUU
SEQ ID NO: 399 - DsiRNA 196 passenger (sense) strand
AUCUUUGUGCAGCUACCUCCGCAUU
SEQ ID NO: 400 - DsiRNA 196 guide (antisense) strand
AAUGCGGAGGUAGCUGCACAAAGAUGG
SEQ ID NO: 401 - DsiRNA 197 passenger (sense) strand
GUGCAGCUACCUCCGCAUUGCUGUG
SEQ ID NO: 402 - DsiRNA 197 guide (antisense) strand
CACAGCAAUGCGGAGGUAGCUGCACAA
SEQ ID NO: 403 - DsiRNA 198 passenger (sense) strand
CCAGCCUCUGAGCUGAGUUGGUUUU
SEQ ID NO: 404 - DsiRNA 198 guide (antisense) strand
AAAACCAACUCAGCUCAGAGGCUGGGA
SEQ ID NO: 405 - DsiRNA 199 passenger (sense) strand
CAGCCUCUGAGCUGAGUUGGUUUUA
SEQ ID NO: 406 - DsiRNA 199 guide (antisense) strand
UAAAACCAACUCAGCUCAGAGGCUGGG
SEQ ID NO: 407 - DsiRNA 200 passenger (sense) strand
AGCCUCUGAGCUGAGUUGGUUUUAU
SEQ ID NO: 408 - DsiRNA 200 guide (antisense) strand
AUAAAACCAACUCAGCUCAGAGGCUGG
SEQ ID NO: 409 - DsiRNA 201 passenger (sense) strand
GCCUCUGAGCUGAGUUGGUUUUAUG
SEQ ID NO: 410 - DsiRNA 201 guide (antisense) strand
CAUAAAACCAACUCAGCUCAGAGGCUG
SEQ ID NO: 411 - DsiRNA 202 passenger (sense) strand
CCUCUGAGCUGAGUUGGUUUUAUGA
SEQ ID NO: 412 - DsiRNA 202 guide (antisense) strand
UCAUAAAACCAACUCAGCUCAGAGGCU
SEQ ID NO: 413 - DsiRNA 203 passenger (sense) strand
CUCUGAGCUGAGUUGGUUUUAUGAA
SEQ ID NO: 414 - DsiRNA 203 guide (antisense) strand
UUCAUAAAACCAACUCAGCUCAGAGGC
SEQ ID NO: 415 - DsiRNA 204 passenger (sense) strand
UCUGAGCUGAGUUGGUUUUAUGAAA
SEQ ID NO: 416 - DsiRNA 204 guide (antisense) strand
UUUCAUAAAACCAACUCAGCUCAGAGG
SEQ ID NO: 417 - DsiRNA 205 passenger (sense) strand
UGAGCUGAGUUGGUUUUAUGAAAAG
SEQ ID NO: 418 - DsiRNA 205 guide (antisense) strand
CUUUUCAUAAAACCAACUCAGCUCAGA
SEQ ID NO: 419 - DsiRNA 206 passenger (sense) strand
UGAGUUGGUUUUAUGAAAAGCUAGG
SEQ ID NO: 420 - DsiRNA 206 guide (antisense) strand
CCUAGCUUUUCAUAAAACCAACUCAGC
SEQ ID NO: 421 - DsiRNA 207 passenger (sense) strand
GAGUUGGUUUUAUGAAAAGCUAGGA
SEQ ID NO: 422 - DsiRNA 207 guide (antisense) strand
UCCUAGCUUUUCAUAAAACCAACUCAG
SEQ ID NO: 423 - DsiRNA 208 passenger (sense) strand
UUGGUUUUAUGAAAAGCUAGGAAGC
SEQ ID NO: 424 - DsiRNA 208 guide (antisense) strand
GCUUCCUAGCUUUUCAUAAAACCAACU
SEQ ID NO: 425 - DsiRNA 209 passenger (sense) strand
UGGUUUUAUGAAAAGCUAGGAAGCA
SEQ ID NO: 426 - DsiRNA 209 guide (antisense) strand
UGCUUCCUAGCUUUUCAUAAAACCAAC
SEQ ID NO: 427 - DsiRNA 210 passenger (sense) strand
GGUUUUAUGAAAAGCUAGGAAGCAA
SEQ ID NO: 428 - DsiRNA 210 guide (antisense) strand
UUGCUUCCUAGCUUUUCAUAAAACCAA
SEQ ID NO: 429 - DsiRNA 211 passenger (sense) strand
UUUUAUGAAAAGCUAGGAAGCAACC
SEQ ID NO: 430 - DsiRNA 211 guide (antisense) strand
GGUUGCUUCCUAGCUUUUCAUAAAACC
SEQ ID NO: 431 - DsiRNA 212 passenger (sense) strand
UUAUGAAAAGCUAGGAAGCAACCUU
SEQ ID NO: 432 - DsiRNA 212 guide (antisense) strand
AAGGUUGCUUCCUAGCUUUUCAUAAAA
SEQ ID NO: 433 - DsiRNA 213 passenger (sense) strand
UAUGAAAAGCUAGGAAGCAACCUUU
SEQ ID NO: 434 - DsiRNA 213 guide (antisense) strand
AAAGGUUGCUUCCUAGCUUUUCAUAAA
SEQ ID NO: 435 - DsiRNA 214 passenger (sense) strand
AUGAAAAGCUAGGAAGCAACCUUUC
SEQ ID NO: 436 - DsiRNA 214 guide (antisense) strand
GAAAGGUUGCUUCCUAGCUUUUCAUAA
SEQ ID NO: 437 - DsiRNA 215 passenger (sense) strand
CCAGCACUUAACUCUAAUACAUCAG
SEQ ID NO: 438 - DsiRNA 215 guide (antisense) strand
CUGAUGUAUUAGAGUUAAGUGCUGGAC
SEQ ID NO: 439 - DsiRNA 216 passenger (sense) strand
CAGCACUUAACUCUAAUACAUCAGC
SEQ ID NO: 440 - DsiRNA 216 guide (antisense) strand
GCUGAUGUAUUAGAGUUAAGUGCUGGA
SEQ ID NO: 441 - DsiRNA 217 passenger (sense) strand
UAAUACAUCAGCAUGCGUUAAUUCA
SEQ ID NO: 442 - DsiRNA 217 guide (antisense) strand
UGAAUUAACGCAUGCUGAUGUAUUAGA
SEQ ID NO: 443 - DsiRNA 218 passenger (sense) strand
AAUACAUCAGCAUGCGUUAAUUCAG
SEQ ID NO: 444 - DsiRNA 218 guide (antisense) strand
CUGAAUUAACGCAUGCUGAUGUAUUAG
SEQ ID NO: 445 - DsiRNA 219 passenger (sense) strand
AGCAUGCGUUAAUUCAGCUGGUUGG
SEQ ID NO: 446 - DsiRNA 219 guide (antisense) strand
CCAACCAGCUGAAUUAACGCAUGCUGA
SEQ ID NO: 447 - DsiRNA 220 passenger (sense) strand
GCAUGCGUUAAUUCAGCUGGUUGGG
SEQ ID NO: 448 - DsiRNA 220 guide (antisense) strand
CCCAACCAGCUGAAUUAACGCAUGCUG
SEQ ID NO: 449 - DsiRNA 221 passenger (sense) strand
UGCGUUAAUUCAGCUGGUUGGGAAA
SEQ ID NO: 450 - DsiRNA 221 guide (antisense) strand
UUUCCCAACCAGCUGAAUUAACGCAUG
SEQ ID NO: 451 - DsiRNA 222 passenger (sense) strand
GCGUUAAUUCAGCUGGUUGGGAAAU
SEQ ID NO: 452 - DsiRNA 222 guide (antisense) strand
AUUUCCCAACCAGCUGAAUUAACGCAU
SEQ ID NO: 453 - DsiRNA 223 passenger (sense) strand
CGUUAAUUCAGCUGGUUGGGAAAUG
SEQ ID NO: 454 - DsiRNA 223 guide (antisense) strand
CAUUUCCCAACCAGCUGAAUUAACGCA
SEQ ID NO: 455 - DsiRNA 224 passenger (sense) strand
GUUAAUUCAGCUGGUUGGGAAAUGA
SEQ ID NO: 456 - DsiRNA 224 guide (antisense) strand
UCAUUUCCCAACCAGCUGAAUUAACGC
SEQ ID NO: 457 - DsiRNA 225 passenger (sense) strand
UUAAUUCAGCUGGUUGGGAAAUGAC
SEQ ID NO: 458 - DsiRNA 225 guide (antisense) strand
GUCAUUUCCCAACCAGCUGAAUUAACG
SEQ ID NO: 459 - DsiRNA 226 passenger (sense) strand
UAAUUCAGCUGGUUGGGAAAUGACA
SEQ ID NO: 460 - DsiRNA 226 guide (antisense) strand
UGUCAUUUCCCAACCAGCUGAAUUAAC
SEQ ID NO: 461 - DsiRNA 227 passenger (sense) strand
AUUCAGCUGGUUGGGAAAUGACACC
SEQ ID NO: 462 - DsiRNA 227 guide (antisense) strand
GGUGUCAUUUCCCAACCAGCUGAAUUA
SEQ ID NO: 463 - DsiRNA 228 passenger (sense) strand
UUCAGCUGGUUGGGAAAUGACACCA
SEQ ID NO: 464 - DsiRNA 228 guide (antisense) strand
UGGUGUCAUUUCCCAACCAGCUGAAUU
SEQ ID NO: 465 - DsiRNA 229 passenger (sense) strand
UCAGCUGGUUGGGAAAUGACACCAG
SEQ ID NO: 466 - DsiRNA 229 guide (antisense) strand
CUGGUGUCAUUUCCCAACCAGCUGAAU
SEQ ID NO: 467 - DsiRNA 230 passenger (sense) strand
CAGCUGGUUGGGAAAUGACACCAGG
SEQ ID NO: 468 - DsiRNA 230 guide (antisense) strand
CCUGGUGUCAUUUCCCAACCAGCUGAA
SEQ ID NO: 469 - DsiRNA 231 passenger (sense) strand
AGCUGGUUGGGAAAUGACACCAGGA
SEQ ID NO: 470 - DsiRNA 231 guide (antisense) strand
UCCUGGUGUCAUUUCCCAACCAGCUGA
SEQ ID NO: 471 - DsiRNA 232 passenger (sense) strand
GCUGGUUGGGAAAUGACACCAGGAA
SEQ ID NO: 472 - DsiRNA 232 guide (antisense) strand
UUCCUGGUGUCAUUUCCCAACCAGCUG
SEQ ID NO: 473 - DsiRNA 233 passenger (sense) strand
GCAGAGGGUCCCUUACUGACUGUUU
SEQ ID NO: 474 - DsiRNA 233 guide (antisense) strand
AAACAGUCAGUAAGGGACCCUCUGCAC
SEQ ID NO: 475 - DsiRNA 234 passenger (sense) strand
CAGAGGGUCCCUUACUGACUGUUUC
SEQ ID NO: 476 - DsiRNA 234 guide (antisense) strand
GAAACAGUCAGUAAGGGACCCUCUGCA
SEQ ID NO: 477 - DsiRNA 235 passenger (sense) strand
AGAGGGUCCCUUACUGACUGUUUCG
SEQ ID NO: 478 - DsiRNA 235 guide (antisense) strand
CGAAACAGUCAGUAAGGGACCCUCUGC
SEQ ID NO: 479 - DsiRNA 236 passenger (sense) strand
CCUAUUAAUGGUCAGACUGUUCCAG
SEQ ID NO: 480 - DsiRNA 236 guide (antisense) strand
CUGGAACAGUCUGACCAUUAAUAGGGC
SEQ ID NO: 481 - DsiRNA 237 passenger (sense) strand
CUAUUAAUGGUCAGACUGUUCCAGC
SEQ ID NO: 482 - DsiRNA 237 guide (antisense) strand
GCUGGAACAGUCUGACCAUUAAUAGGG
SEQ ID NO: 483 - DsiRNA 238 passenger (sense) strand
UAUUAAUGGUCAGACUGUUCCAGCA
SEQ ID NO: 484 - DsiRNA 238 guide (antisense) strand
UGCUGGAACAGUCUGACCAUUAAUAGG
SEQ ID NO: 485 - DsiRNA 239 passenger (sense) strand
AUUAAUGGUCAGACUGUUCCAGCAU
SEQ ID NO: 486 - DsiRNA 239 guide (antisense) strand
AUGCUGGAACAGUCUGACCAUUAAUAG
SEQ ID NO: 487 - DsiRNA 240 passenger (sense) strand
UUAAUGGUCAGACUGUUCCAGCAUG
SEQ ID NO: 488 - DsiRNA 240 guide (antisense) strand
CAUGCUGGAACAGUCUGACCAUUAAUA
SEQ ID NO: 489 - DsiRNA 241 passenger (sense) strand
UAAUGGUCAGACUGUUCCAGCAUGA
SEQ ID NO: 490 - DsiRNA 241 guide (antisense) strand
UCAUGCUGGAACAGUCUGACCAUUAAU
SEQ ID NO: 491 - DsiRNA 242 passenger (sense) strand
AAUGGUCAGACUGUUCCAGCAUGAG
SEQ ID NO: 492 - DsiRNA 242 guide (antisense) strand
CUCAUGCUGGAACAGUCUGACCAUUAA
SEQ ID NO: 493 - DsiRNA 243 passenger (sense) strand
AGAACGACACUGCCUGUCAGGUGGU
SEQ ID NO: 494 - DsiRNA 243 guide (antisense) strand
ACCACCUGACAGGCAGUGUCGUUCUUG
SEQ ID NO: 495 - DsiRNA 244 passenger (sense) strand
CGACACUGCCUGUCAGGUGGUCUGC
SEQ ID NO: 496 - DsiRNA 244 guide (antisense) strand
GCAGACCACCUGACAGGCAGUGUCGUU
SEQ ID NO: 497 - DsiRNA 245 passenger (sense) strand
AACCUUGACUACUAAAAACGUCUCC
SEQ ID NO: 498 - DsiRNA 245 guide (antisense) strand
GGAGACGUUUUUAGUAGUCAAGGUUAU
SEQ ID NO: 499 - DsiRNA 246 passenger (sense) strand
UUUAGAACACCUUUUUCACCUAACU
SEQ ID NO: 500 - DsiRNA 246 guide (antisense) strand
AGUUAGGUGAAAAAGGUGUUCUAAAAU
SEQ ID NO: 501 - DsiRNA 247 passenger (sense) strand
UUAGAACACCUUUUUCACCUAACUA
SEQ ID NO: 502 - DsiRNA 247 guide (antisense) strand
UAGUUAGGUGAAAAAGGUGUUCUAAAA
SEQ ID NO: 503 - DsiRNA 248 passenger (sense) strand
UAGAACACCUUUUUCACCUAACUAA
SEQ ID NO: 504 - DsiRNA 248 guide (antisense) strand
UUAGUUAGGUGAAAAAGGUGUUCUAAA
SEQ ID NO: 505 - DsiRNA 249 passenger (sense) strand
AGAACACCUUUUUCACCUAACUAAA
SEQ ID NO: 506 - DsiRNA 249 guide (antisense) strand
UUUAGUUAGGUGAAAAAGGUGUUCUAA
SEQ ID NO: 507 - DsiRNA 250 passenger (sense) strand
GAACACCUUUUUCACCUAACUAAAA
SEQ ID NO: 508 - DsiRNA 250 guide (antisense) strand
UUUUAGUUAGGUGAAAAAGGUGUUCUA
SEQ ID NO: 509 - DsiRNA 251 passenger (sense) strand
AACACCUUUUUCACCUAACUAAAAU
SEQ ID NO: 510 - DsiRNA 251 guide (antisense) strand
AUUUUAGUUAGGUGAAAAAGGUGUUCU
SEQ ID NO: 511 - DsiRNA 252 passenger (sense) strand
ACACCUUUUUCACCUAACUAAAAUA
SEQ ID NO: 512 - DsiRNA 252 guide (antisense) strand
UAUUUUAGUUAGGUGAAAAAGGUGUUC
SEQ ID NO: 513 - DsiRNA 253 passenger (sense) strand
CACCUUUUUCACCUAACUAAAAUAA
SEQ ID NO: 514 - DsiRNA 253 guide (antisense) strand
UUAUUUUAGUUAGGUGAAAAAGGUGUU
SEQ ID NO: 515 - DsiRNA 254 passenger (sense) strand
ACCUUUUUCACCUAACUAAAAUAAU
SEQ ID NO: 516 - DsiRNA 254 guide (antisense) strand
AUUAUUUUAGUUAGGUGAAAAAGGUGU
SEQ ID NO: 517 - DsiRNA 255 passenger (sense) strand
CUUUUUCACCUAACUAAAAUAAUGU
SEQ ID NO: 518 - DsiRNA 255 guide (antisense) strand
ACAUUAUUUUAGUUAGGUGAAAAAGGU
SEQ ID NO: 519 - DsiRNA 256 passenger (sense) strand
UUUUCACCUAACUAAAAUAAUGUUU
SEQ ID NO: 520 - DsiRNA 256 guide (antisense) strand
AAACAUUAUUUUAGUUAGGUGAAAAAG
SEQ ID NO: 521 - DsiRNA 257 passenger (sense) strand
UUCACCUAACUAAAAUAAUGUUUAA
SEQ ID NO: 522 - DsiRNA 257 guide (antisense) strand
UUAAACAUUAUUUUAGUUAGGUGAAAA
SEQ ID NO: 523 - DsiRNA 258 passenger (sense) strand
UCACCUAACUAAAAUAAUGUUUAAA
SEQ ID NO: 524 - DsiRNA 258 guide (antisense) strand
UUUAAACAUUAUUUUAGUUAGGUGAAA
SEQ ID NO: 525 - DsiRNA 259 passenger (sense) strand
CACCUAACUAAAAUAAUGUUUAAAG
SEQ ID NO: 526 - DsiRNA 259 guide (antisense) strand
CUUUAAACAUUAUUUUAGUUAGGUGAA
SEQ ID NO: 527 - DsiRNA 260 passenger (sense) strand
ACCUAACUAAAAUAAUGUUUAAAGA
SEQ ID NO: 528 - DsiRNA 260 guide (antisense) strand
UCUUUAAACAUUAUUUUAGUUAGGUGA
SEQ ID NO: 529 - DsiRNA 261 passenger (sense) strand
CCUAACUAAAAUAAUGUUUAAAGAG
SEQ ID NO: 530 - DsiRNA 261 guide (antisense) strand
CUCUUUAAACAUUAUUUUAGUUAGGUG
SEQ ID NO: 531 - DsiRNA 262 passenger (sense) strand
CUAACUAAAAUAAUGUUUAAAGAGU
SEQ ID NO: 532 - DsiRNA 262 guide (antisense) strand
ACUCUUUAAACAUUAUUUUAGUUAGGU
SEQ ID NO: 533 - DsiRNA 263 passenger (sense) strand
UAACUAAAAUAAUGUUUAAAGAGUU
SEQ ID NO: 534 - DsiRNA 263 guide (antisense) strand
AACUCUUUAAACAUUAUUUUAGUUAGG
SEQ ID NO: 535 - DsiRNA 264 passenger (sense) strand
AACUAAAAUAAUGUUUAAAGAGUUU
SEQ ID NO: 536 - DsiRNA 264 guide (antisense) strand
AAACUCUUUAAACAUUAUUUUAGUUAG
SEQ ID NO: 537 - DsiRNA 265 passenger (sense) strand
ACUAAAAUAAUGUUUAAAGAGUUUU
SEQ ID NO: 538 - DsiRNA 265 guide (antisense) strand
AAAACUCUUUAAACAUUAUUUUAGUUA
SEQ ID NO: 539 - DsiRNA 266 passenger (sense) strand
CUAAAAUAAUGUUUAAAGAGUUUUG
SEQ ID NO: 540 - DsiRNA 266 guide (antisense) strand
CAAAACUCUUUAAACAUUAUUUUAGUU
SEQ ID NO: 541 - DsiRNA 267 passenger (sense) strand
UAAAAUAAUGUUUAAAGAGUUUUGU
SEQ ID NO: 542 - DsiRNA 267 guide (antisense) strand
ACAAAACUCUUUAAACAUUAUUUUAGU
SEQ ID NO: 543 - DsiRNA 268 passenger (sense) strand
AAGAGUUUUGUAUAAAAAUGUAAGG
SEQ ID NO: 544 - DsiRNA 268 guide (antisense) strand
CCUUACAUUUUUAUACAAAACUCUUUA
SEQ ID NO: 545 - DsiRNA 269 passenger (sense) strand
GUUUUGUAUAAAAAUGUAAGGAAGC
SEQ ID NO: 546 - DsiRNA 269 guide (antisense) strand
GCUUCCUUACAUUUUUAUACAAAACUC
SEQ ID NO: 547 - DsiRNA 270 passenger (sense) strand
UUUUGUAUAAAAAUGUAAGGAAGCG
SEQ ID NO: 548 - DsiRNA 270 guide (antisense) strand
CGCUUCCUUACAUUUUUAUACAAAACU
SEQ ID NO: 549 - DsiRNA 271 passenger (sense) strand
UUUGUAUAAAAAUGUAAGGAAGCGU
SEQ ID NO: 550 - DsiRNA 271 guide (antisense) strand
ACGCUUCCUUACAUUUUUAUACAAAAC
SEQ ID NO: 551 - DsiRNA 272 passenger (sense) strand
UUGUAUAAAAAUGUAAGGAAGCGUU
SEQ ID NO: 552 - DsiRNA 272 guide (antisense) strand
AACGCUUCCUUACAUUUUUAUACAAAA
SEQ ID NO: 553 - DsiRNA 273 passenger (sense) strand
UGUAUAAAAAUGUAAGGAAGCGUUG
SEQ ID NO: 554 - DsiRNA 273 guide (antisense) strand
CAACGCUUCCUUACAUUUUUAUACAAA
SEQ ID NO: 555 - DsiRNA 274 passenger (sense) strand
GUAUAAAAAUGUAAGGAAGCGUUGU
SEQ ID NO: 556 - DsiRNA 274 guide (antisense) strand
ACAACGCUUCCUUACAUUUUUAUACAA
SEQ ID NO: 557 - DsiRNA 275 passenger (sense) strand
AUGUAAGGAAGCGUUGUUACCUGUU
SEQ ID NO: 558 - DsiRNA 275 guide (antisense) strand
AACAGGUAACAACGCUUCCUUACAUUU
SEQ ID NO: 559 - DsiRNA 276 passenger (sense) strand
UUUUGUAUUAUGUGAAUCAGUGAGA
SEQ ID NO: 560 - DsiRNA 276 guide (antisense) strand
UCUCACUGAUUCACAUAAUACAAAAUU
SEQ ID NO: 561 - DsiRNA 277 passenger (sense) strand
UUUGUAUUAUGUGAAUCAGUGAGAU
SEQ ID NO: 562 - DsiRNA 277 guide (antisense) strand
AUCUCACUGAUUCACAUAAUACAAAAU
SEQ ID NO: 563 - DsiRNA 278 passenger (sense) strand
UUGUAUUAUGUGAAUCAGUGAGAUG
SEQ ID NO: 564 - DsiRNA 278 guide (antisense) strand
CAUCUCACUGAUUCACAUAAUACAAAA
SEQ ID NO: 565 - DsiRNA 279 passenger (sense) strand
UGUAUUAUGUGAAUCAGUGAGAUGU
SEQ ID NO: 566 - DsiRNA 279 guide (antisense) strand
ACAUCUCACUGAUUCACAUAAUACAAA
SEQ ID NO: 567 - DsiRNA 280 passenger (sense) strand
GUAUUAUGUGAAUCAGUGAGAUGUU
SEQ ID NO: 568 - DsiRNA 280 guide (antisense) strand
AACAUCUCACUGAUUCACAUAAUACAA
SEQ ID NO: 569 - DsiRNA 281 passenger (sense) strand
UAUUAUGUGAAUCAGUGAGAUGUUA
SEQ ID NO: 570 - DsiRNA 281 guide (antisense) strand
UAACAUCUCACUGAUUCACAUAAUACA
SEQ ID NO: 571 - DsiRNA 282 passenger (sense) strand
AUUAUGUGAAUCAGUGAGAUGUUAG
SEQ ID NO: 572 - DsiRNA 282 guide (antisense) strand
CUAACAUCUCACUGAUUCACAUAAUAC
SEQ ID NO: 573 - DsiRNA 283 passenger (sense) strand
UUAUGUGAAUCAGUGAGAUGUUAGU
SEQ ID NO: 574 - DsiRNA 283 guide (antisense) strand
ACUAACAUCUCACUGAUUCACAUAAUA
SEQ ID NO: 575 - DsiRNA 284 passenger (sense) strand
UAUGUGAAUCAGUGAGAUGUUAGUA
SEQ ID NO: 576 - DsiRNA 284 guide (antisense) strand
UACUAACAUCUCACUGAUUCACAUAAU
SEQ ID NO: 577 - DsiRNA 285 passenger (sense) strand
AUGUGAAUCAGUGAGAUGUUAGUAG
SEQ ID NO: 578 - DsiRNA 285 guide (antisense) strand
CUACUAACAUCUCACUGAUUCACAUAA
SEQ ID NO: 579 - DsiRNA 286 passenger (sense) strand
UGUGAAUCAGUGAGAUGUUAGUAGA
SEQ ID NO: 580 - DsiRNA 286 guide (antisense) strand
UCUACUAACAUCUCACUGAUUCACAUA
SEQ ID NO: 581 - DsiRNA 287 passenger (sense) strand
GUGAAUCAGUGAGAUGUUAGUAGAA
SEQ ID NO: 582 - DsiRNA 287 guide (antisense) strand
UUCUACUAACAUCUCACUGAUUCACAU
SEQ ID NO: 583 - DsiRNA 288 passenger (sense) strand
GUGAGAUGUUAGUAGAAUAAGCCUU
SEQ ID NO: 584 - DsiRNA 288 guide (antisense) strand
AAGGCUUAUUCUACUAACAUCUCACUG
SEQ ID NO: 585 - DsiRNA 289 passenger (sense) strand
UUUUCUAUUUAUGCAUUUGAGUACA
SEQ ID NO: 586 - DsiRNA 289 guide (antisense) strand
UGUACUCAAAUGCAUAAAUAGAAAAAA
SEQ ID NO: 587 - DsiRNA 290 passenger (sense) strand
UUUCUAUUUAUGCAUUUGAGUACAG
SEQ ID NO: 588 - DsiRNA 290 guide (antisense) strand
CUGUACUCAAAUGCAUAAAUAGAAAAA
SEQ ID NO: 589 - DsiRNA 291 passenger (sense) strand
UUCUAUUUAUGCAUUUGAGUACAGT
SEQ ID NO: 590 - DsiRNA 291 guide (antisense) strand
ACUGUACUCAAAUGCAUAAAUAGAAAA
SEQ ID NO: 591 - DsiRNA 292 passenger (sense) strand
CUAUUUAUGCAUUUGAGUACAGUAC
SEQ ID NO: 592 - DsiRNA 292 guide (antisense) strand
GUACUGUACUCAAAUGCAUAAAUAGAA
SEQ ID NO: 593 - DsiRNA 293 passenger (sense) strand
UGCUCAAACUGUUAAAUGUUGGAAA
SEQ ID NO: 594 - DsiRNA 293 guide (antisense) strand
UUUCCAACAUUUAACAGUUUGAGCACA
SEQ ID NO: - DsiRNA 294 passenger (sense) strand
GCUCAAACUGUUAAAUGUUGGAAAA 595
SEQ ID NO: 596 - DsiRNA 294 guide (antisense) strand
UUUUCCAACAUUUAACAGUUUGAGCAC
SEQ ID NO: 597 - DsiRNA 295 passenger (sense) strand
CUCAAACUGUUAAAUGUUGGAAAAG
SEQ ID NO: 598 - DsiRNA 295 guide (antisense) strand
CUUUUCCAACAUUUAACAGUUUGAGCA
SEQ ID NO: 599 - DsiRNA 296 passenger (sense) strand
UCAAACUGUUAAAUGUUGGAAAAGA
SEQ ID NO: 600 - DsiRNA 296 guide (antisense) strand
UCUUUUCCAACAUUUAACAGUUUGAGC
SEQ ID NO: 601 - DsiRNA 297 passenger (sense) strand
CAAACUGUUAAAUGUUGGAAAAGAA
SEQ ID NO: 602 - DsiRNA 297 guide (antisense) strand
UUCUUUUCCAACAUUUAACAGUUUGAG
SEQ ID NO: 603 - DsiRNA 298 passenger (sense) strand
AAACUGUUAAAUGUUGGAAAAGAAA
SEQ ID NO: 604 - DsiRNA 298 guide (antisense) strand
UUUCUUUUCCAACAUUUAACAGUUUGA
SEQ ID NO: 605 - DsiRNA 299 passenger (sense) strand
AACUGUUAAAUGUUGGAAAAGAAAG
SEQ ID NO: 606 - DsiRNA 299 guide (antisense) strand
CUUUCUUUUCCAACAUUUAACAGUUUG
SEQ ID NO: 607 - DsiRNA 300 passenger (sense) strand
ACUGUUAAAUGUUGGAAAAGAAAGA
SEQ ID NO: 608 - DsiRNA 300 guide (antisense) strand
UCUUUCUUUUCCAACAUUUAACAGUUU
SEQ ID NO: 609 - DsiRNA 301 passenger (sense) strand
CUGUUAAAUGUUGGAAAAGAAAGAT
SEQ ID NO: 610 - DsiRNA 301 guide (antisense) strand
AUCUUUCUUUUCCAACAUUUAACAGUU
SEQ ID NO: 611 - DsiRNA 302 passenger (sense) strand
UGUUAAAUGUUGGAAAAGAAAGATA
SEQ ID NO: 612 - DsiRNA 302 guide (antisense) strand
UAUCUUUCUUUUCCAACAUUUAACAGU
SEQ ID NO: 613 - DsiRNA 303 passenger (sense) strand
GUUAAAUGUUGGAAAAGAAAGAUAC
SEQ ID NO: 614 - DsiRNA 303 guide (antisense) strand
GUAUCUUUCUUUUCCAACAUUUAACAG
SEQ ID NO: 615 - DsiRNA 304 passenger (sense) strand
UUAAAUGUUGGAAAAGAAAGAUACA
SEQ ID NO: 616 - DsiRNA 304 guide (antisense) strand
UGUAUCUUUCUUUUCCAACAUUUAACA
SEQ ID NO: 617 - DsiRNA 305 passenger (sense) strand
UAAAUGUUGGAAAAGAAAGAUACAA
SEQ ID NO: 618 - DsiRNA 305 guide (antisense) strand
UUGUAUCUUUCUUUUCCAACAUUUAAC
SEQ ID NO: 619 - DsiRNA 306 passenger (sense) strand
GCACUUGACUGAGAAGACAGACCCT
SEQ ID NO: 620 - DsiRNA 306 guide (antisense) strand
AGGGUCUGUCUUCUCAGUCAAGUGCUU
SEQ ID NO: 621 - DsiRNA 307 passenger (sense) strand
GAGAAAAGAGGCUACUUGUGAAAAT
SEQ ID NO: 622 - DsiRNA 307 guide (antisense) strand
AUUUUCACAAGUAGCCUCUUUUCUCAA
SEQ ID NO: 623 - DsiRNA 308 passenger (sense) strand
AGAAAAGAGGCUACUUGUGAAAATA
SEQ ID NO: 624 - DsiRNA 308 guide (antisense) strand
UAUUUUCACAAGUAGCCUCUUUUCUCA
SEQ ID NO: 625 - DsiRNA 309 passenger (sense) strand
GAAAAGAGGCUACUUGUGAAAAUAA
SEQ ID NO: 626 - DsiRNA 309 guide (antisense) strand
UUAUUUUCACAAGUAGCCUCUUUUCUC
SEQ ID NO: 627 - DsiRNA 310 passenger (sense) strand
AAAAGAGGCUACUUGUGAAAAUAAT
SEQ ID NO: 628 - DsiRNA 310 guide (antisense) strand
AUUAUUUUCACAAGUAGCCUCUUUUCU
SEQ ID NO: 629 - DsiRNA 311 passenger (sense) strand
AAAGAGGCUACUUGUGAAAAUAATG
SEQ ID NO: 630 - DsiRNA 311 guide (antisense) strand
CAUUAUUUUCACAAGUAGCCUCUUUUC
SEQ ID NO: 631 - DsiRNA 312 passenger (sense) strand
AAGAGGCUACUUGUGAAAAUAAUGA
SEQ ID NO: 632 - DsiRNA 312 guide (antisense) strand
UCAUUAUUUUCACAAGUAGCCUCUUUU
SEQ ID NO: 633 - DsiRNA 313 passenger (sense) strand
AGAGGCUACUUGUGAAAAUAAUGAG
SEQ ID NO: 634 - DsiRNA 313 guide (antisense) strand
CUCAUUAUUUUCACAAGUAGCCUCUUU
SEQ ID NO: 635 - DsiRNA 314 passenger (sense) strand
GAGGCUACUUGUGAAAAUAAUGAGC
SEQ ID NO: 636 - DsiRNA 314 guide (antisense) strand
GCUCAUUAUUUUCACAAGUAGCCUCUU
SEQ ID NO: 637 - DsiRNA 315 passenger (sense) strand
GGCUACUUGUGAAAAUAAUGAGCCC
SEQ ID NO: 638 - DsiRNA 315 guide (antisense) strand
GGGCUCAUUAUUUUCACAAGUAGCCUC
SEQ ID NO: 639 - DsiRNA 316 passenger (sense) strand
CUACUUGUGAAAAUAAUGAGCCCCC
SEQ ID NO: 640 - DsiRNA 316 guide (antisense) strand
GGGGGCUCAUUAUUUUCACAAGUAGCC
SEQ ID NO: 641 - DsiRNA 317 passenger (sense) strand
UGAACCUGCCUUCUUACAUCUUGAG
SEQ ID NO: 642 - DsiRNA 317 guide (antisense) strand
CUCAAGAUGUAAGAAGGCAGGUUCAAA
SEQ ID NO: 643 - DsiRNA 318 passenger (sense) strand
AAAGUUACAAGUUUCUUUUCCCAAG
SEQ ID NO: 644 - DsiRNA 318 guide (antisense) strand
CUUGGGAAAAGAAACUUGUAACUUUCC
SEQ ID NO: 645 - DsiRNA 319 passenger (sense) strand
AAGUUACAAGUUUCUUUUCCCAAGT
SEQ ID NO: 646 - DsiRNA 319 guide (antisense) strand
ACUUGGGAAAAGAAACUUGUAACUUUC
SEQ ID NO: 647 - DsiRNA 320 passenger (sense) strand
AGUUACAAGUUUCUUUUCCCAAGTT
SEQ ID NO: 648 - DsiRNA 320 guide (antisense) strand
AACUUGGGAAAAGAAACUUGUAACUUU
SEQ ID NO: 649 - DsiRNA 321 passenger (sense) strand
AGUUUCUUUUCCCAAGUUUCCCAGT
SEQ ID NO: 650 - DsiRNA 321 guide (antisense) strand
ACUGGGAAACUUGGGAAAAGAAACUUG
SEQ ID NO: 651 - DsiRNA 322 passenger (sense) strand
CAACAGUAUUUUCUAAUAACCAGTA
SEQ ID NO: 652 - DsiRNA 322 guide (antisense) strand
UACUGGUUAUUAGAAAAUACUGUUGGC
SEQ ID NO: 653 - DsiRNA 323 passenger (sense) strand
AACAGUAUUUUCUAAUAACCAGUAT
SEQ ID NO: 654 - DsiRNA 323 guide (antisense) strand
AUACUGGUUAUUAGAAAAUACUGUUGG
SEQ ID NO: 655 - DsiRNA 324 passenger (sense) strand
ACAGUAUUUUCUAAUAACCAGUATA
SEQ ID NO: 656 - DsiRNA 324 guide (antisense) strand
UAUACUGGUUAUUAGAAAAUACUGUUG
SEQ ID NO: 657 - DsiRNA 325 passenger (sense) strand
CAGUAUUUUCUAAUAACCAGUAUAT
SEQ ID NO: 658 - DsiRNA 325 guide (antisense) strand
AUAUACUGGUUAUUAGAAAAUACUGUU
SEQ ID NO: 659 - DsiRNA 326 passenger (sense) strand
UUGUGAUUGUUAUCAGGAAAAAATA
SEQ ID NO: 660 - DsiRNA 326 guide (antisense) strand
UAUUUUUUCCUGAUAACAAUCACAAUA
SEQ ID NO: 661 - DsiRNA 327 passenger (sense) strand
UGUGAUUGUUAUCAGGAAAAAAUAT
SEQ ID NO: 662 - DsiRNA 327 guide (antisense) strand
AUAUUUUUUCCUGAUAACAAUCACAAU
SEQ ID NO: 663 - DsiRNA 328 passenger (sense) strand
GUGAUUGUUAUCAGGAAAAAAUATA
SEQ ID NO: 664 - DsiRNA 328 guide (antisense) strand
UAUAUUUUUUCCUGAUAACAAUCACAA
SEQ ID NO: 665 - DsiRNA 329 passenger (sense) strand
UGAUUGUUAUCAGGAAAAAAUAUAT
SEQ ID NO: 666 - DsiRNA 329 guide (antisense) strand
AUAUAUUUUUUCCUGAUAACAAUCACA
SEQ ID NO: 667 - DsiRNA 330 passenger (sense) strand
GAUUGUUAUCAGGAAAAAAUAUATT
SEQ ID NO: 668 - DsiRNA 330 guide (antisense) strand
AAUAUAUUUUUUCCUGAUAACAAUCAC
SEQ ID NO: 669 - DsiRNA 331 passenger (sense) strand
AUUGUUAUCAGGAAAAAAUAUAUTA
SEQ ID NO: 670 - DsiRNA 331 guide (antisense) strand
UAAUAUAUUUUUUCCUGAUAACAAUCA
SEQ ID NO: 671 - DsiRNA 332 passenger (sense) strand
UUGUUAUCAGGAAAAAAUAUAUUAA
SEQ ID NO: 672 - DsiRNA 332 guide (antisense) strand
UUAAUAUAUUUUUUCCUGAUAACAAUC
SEQ ID NO: 673 - DsiRNA 333 passenger (sense) strand
UGUUAUCAGGAAAAAAUAUAUUAAA
SEQ ID NO: 674 - DsiRNA 333 guide (antisense) strand
UUUAAUAUAUUUUUUCCUGAUAACAAU
SEQ ID NO: 675 - DsiRNA 334 passenger (sense) strand
GUUAUCAGGAAAAAAUAUAUUAAAT
SEQ ID NO: 676 - DsiRNA 334 guide (antisense) strand
AUUUAAUAUAUUUUUUCCUGAUAACAA
SEQ ID NO: 677 - DsiRNA 335 passenger (sense) strand
UUAUCAGGAAAAAAUAUAUUAAATG
SEQ ID NO: 678 - DsiRNA 335 guide (antisense) strand
CAUUUAAUAUAUUUUUUCCUGAUAACA
SEQ ID NO: 679 - DsiRNA 336 passenger (sense) strand
UAUCAGGAAAAAAUAUAUUAAAUGG
SEQ ID NO: 680 - DsiRNA 336 guide (antisense) strand
CCAUUUAAUAUAUUUUUUCCUGAUAAC
SEQ ID NO: 681 - DsiRNA 337 passenger (sense) strand
AUCAGGAAAAAAUAUAUUAAAUGGC
SEQ ID NO: 682 - DsiRNA 337 guide (antisense) strand
GCCAUUUAAUAUAUUUUUUCCUGAUAA
SEQ ID NO: 683 - DsiRNA 338 passenger (sense) strand
AGGAAAAAAUAUAUUAAAUGGCUGA
SEQ ID NO: 684 - DsiRNA 338 guide (antisense) strand
UCAGCCAUUUAAUAUAUUUUUUCCUGA
SEQ ID NO: 685 - DsiRNA 339 passenger (sense) strand
GGAAAAAAUAUAUUAAAUGGCUGAT
SEQ ID NO: 686 - DsiRNA 339 guide (antisense) strand
AUCAGCCAUUUAAUAUAUUUUUUCCUG
SEQ ID NO: 687 - DsiRNA 340 passenger (sense) strand
GAAAAAAUAUAUUAAAUGGCUGATA
SEQ ID NO: 688 - DsiRNA 340 guide (antisense) strand
UAUCAGCCAUUUAAUAUAUUUUUUCCU
SEQ ID NO: 689 - DsiRNA 341 passenger (sense) strand
AAAAAAUAUAUUAAAUGGCUGAUAG
SEQ ID NO: 690 - DsiRNA 341 guide (antisense) strand
CUAUCAGCCAUUUAAUAUAUUUUUUCC
SEQ ID NO: 691 - DsiRNA 342 passenger (sense) strand
UAUUUUCUUUCUGCUUUUAAAAATT
SEQ ID NO: 692 - DsiRNA 342 guide (antisense) strand
AAUUUUUAAAAGCAGAAAGAAAAUACG
SEQ ID NO: 693 - DsiRNA 343 passenger (sense) strand
AUUUUCUUUCUGCUUUUAAAAAUTA
SEQ ID NO: 694 - DsiRNA 343 guide (antisense) strand
UAAUUUUUAAAAGCAGAAAGAAAAUAC
SEQ ID NO: 695 - DsiRNA 344 passenger (sense) strand
UCUUUCUGCUUUUAAAAAUUAUUCA
SEQ ID NO: 696 - DsiRNA 344 guide (antisense) strand
UGAAUAAUUUUUAAAAGCAGAAAGAAA
SEQ ID NO: 697 - DsiRNA 345 passenger (sense) strand
CUUUCUGCUUUUAAAAAUUAUUCAG
SEQ ID NO: 698 - DsiRNA 345 guide (antisense) strand
CUGAAUAAUUUUUAAAAGCAGAAAGAA
SEQ ID NO: 699 - DsiRNA 346 passenger (sense) strand
UUUCUGCUUUUAAAAAUUAUUCAGG
SEQ ID NO: 700 - DsiRNA 346 guide (antisense) strand
CCUGAAUAAUUUUUAAAAGCAGAAAGA
SEQ ID NO: 701 - DsiRNA 347 passenger (sense) strand
CUACUAAAAACACAAAAAUUAGCCA
SEQ ID NO: 702 - DsiRNA 347 guide (antisense) strand
UGGCUAAUUUUUGUGUUUUUAGUAGAG
SEQ ID NO: 703 - DsiRNA 348 passenger (sense) strand
CAAGAUAAGGAAAUCAGGAAGUGTA
SEQ ID NO: 704 - DsiRNA 348 guide (antisense) strand
UACACUUCCUGAUUUCCUUAUCUUGAU
SEQ ID NO: 705 - DsiRNA 349 passenger (sense) strand
AAGAUAAGGAAAUCAGGAAGUGUAA
SEQ ID NO: 706 - DsiRNA 349 guide (antisense) strand
UUACACUUCCUGAUUUCCUUAUCUUGA
SEQ ID NO: 707 - DsiRNA 350 passenger (sense) strand
AGAUAAGGAAAUCAGGAAGUGUAAT
SEQ ID NO: 708 - DsiRNA 350 guide (antisense) strand
AUUACACUUCCUGAUUUCCUUAUCUUG
SEQ ID NO: 709 - DsiRNA 351 passenger (sense) strand
GAUAAGGAAAUCAGGAAGUGUAATA
SEQ ID NO: 710 - DsiRNA 351 guide (antisense) strand
UAUUACACUUCCUGAUUUCCUUAUCUU
SEQ ID NO: 711 - DsiRNA 352 passenger (sense) strand
AUAAGGAAAUCAGGAAGUGUAAUAT
SEQ ID NO: 712 - DsiRNA 352 guide (antisense) strand
AUAUUACACUUCCUGAUUUCCUUAUCU
SEQ ID NO: 713 - DsiRNA 353 passenger (sense) strand
UAAGGAAAUCAGGAAGUGUAAUATT
SEQ ID NO: 714 - DsiRNA 353 guide (antisense) strand
AAUAUUACACUUCCUGAUUUCCUUAUC
SEQ ID NO: 715 - DsiRNA 354 passenger (sense) strand
AAGGAAAUCAGGAAGUGUAAUAUTC
SEQ ID NO: 716 - DsiRNA 354 guide (antisense) strand
GAAUAUUACACUUCCUGAUUUCCUUAU
SEQ ID NO: 717 - DsiRNA 355 passenger (sense) strand
AGGAAAUCAGGAAGUGUAAUAUUCT
SEQ ID NO: 718 - DsiRNA 355 guide (antisense) strand
AGAAUAUUACACUUCCUGAUUUCCUUA
SEQ ID NO: 719 - DsiRNA 356 passenger (sense) strand
GGAAAUCAGGAAGUGUAAUAUUCTT
SEQ ID NO: 720 - DsiRNA 356 guide (antisense) strand
AAGAAUAUUACACUUCCUGAUUUCCUU
SEQ ID NO: 721 - DsiRNA 357 passenger (sense) strand
GAAAUCAGGAAGUGUAAUAUUCUTA
SEQ ID NO: 722 - DsiRNA 357 guide (antisense) strand
UAAGAAUAUUACACUUCCUGAUUUCCU
SEQ ID NO: 723 - DsiRNA 358 passenger (sense) strand
CUAUGAAUGCAUUCUUAUUUCUUCT
SEQ ID NO: 724 - DsiRNA 358 guide (antisense) strand
AGAAGAAAUAAGAAUGCAUUCAUAGGC
SEQ ID NO: 725 - DsiRNA 359 passenger (sense) strand
UAUGAAUGCAUUCUUAUUUCUUCTT
SEQ ID NO: 726 - DsiRNA 359 guide (antisense) strand
AAGAAGAAAUAAGAAUGCAUUCAUAGG
SEQ ID NO: 727 - DsiRNA 360 passenger (sense) strand
CUACCACACCCAGCUAGUUUUUUTT
SEQ ID NO: 728 - DsiRNA 360 guide (antisense) strand
AAAAAAAACUAGCUGGGUGUGGUAGUG
SEQ ID NO: 729 - DsiRNA 361 passenger (sense) strand
CCACACCCAGCUAGUUUUUUUUUGT
SEQ ID NO: 730 - DsiRNA 361 guide (antisense) strand
ACAAAAAAAAACUAGCUGGGUGUGGUA
SEQ ID NO: 731 - DsiRNA 362 passenger (sense) strand
CACACCCAGCUAGUUUUUUUUUGTA
SEQ ID NO: 732 - DsiRNA 362 guide (antisense) strand
UACAAAAAAAAACUAGCUGGGUGUGGU
SEQ ID NO: 733 - DsiRNA 363 passenger (sense) strand
GCUAGGAUUACAGGUGUGAGCUACC
SEQ ID NO: 734 - DsiRNA 363 guide (antisense) strand
GGUAGCUCACACCUGUAAUCCUAGCAC
SEQ ID NO: 735 - DsiRNA 364 passenger (sense) strand
CUAGGAUUACAGGUGUGAGCUACCA
SEQ ID NO: 736 - DsiRNA 364 guide (antisense) strand
UGGUAGCUCACACCUGUAAUCCUAGCA
SEQ ID NO: 737 - DsiRNA 365 passenger (sense) strand
CCAUGCCUGGUCCAACAUUCUUCAT
SEQ ID NO: 738 - DsiRNA 365 guide (antisense) strand
AUGAAGAAUGUUGGACCAGGCAUGGUA
SEQ ID NO: 739 - DsiRNA 366 passenger (sense) strand
UGCAGAGUAUGAGCCUGAUUUUGTT
SEQ ID NO: 740 - DsiRNA 366 guide (antisense) strand
AACAAAAUCAGGCUCAUACUCUGCACU
SEQ ID NO: 741 - DsiRNA 367 passenger (sense) strand
GCAGAGUAUGAGCCUGAUUUUGUTT
SEQ ID NO: 742 - DsiRNA 367 guide (antisense) strand
AAACAAAAUCAGGCUCAUACUCUGCAC
SEQ ID NO: 743 - DsiRNA 368 passenger (sense) strand
CAGAGUAUGAGCCUGAUUUUGUUTA
SEQ ID NO: 744 - DsiRNA 368 guide (antisense) strand
UAAACAAAAUCAGGCUCAUACUCUGCA
SEQ ID NO: 745 - DsiRNA 369 passenger (sense) strand
AGAGUAUGAGCCUGAUUUUGUUUAA
SEQ ID NO: 746 - DsiRNA 369 guide (antisense) strand
UUAAACAAAAUCAGGCUCAUACUCUGC
SEQ ID NO: 747 - DsiRNA 370 passenger (sense) strand
GAGUAUGAGCCUGAUUUUGUUUAAA
SEQ ID NO: 748 - DsiRNA 370 guide (antisense) strand
UUUAAACAAAAUCAGGCUCAUACUCUG
SEQ ID NO: 749 - DsiRNA 371 passenger (sense)
GGGUGAAACCCCAUCUCUACUAAAA
SEQ ID NO: 750 - DsiRNA 371 guide (antisense) strand
UUUUAGUAGAGAUGGGGUUUCACCCAG
SEQ ID NO: 751 - DsiRNA 372 passenger (sense) strand
GUGAAACCCCAUCUCUACUAAAAAA
SEQ ID NO: 752 - DsiRNA 372 guide (antisense) strand
UUUUUUAGUAGAGAUGGGGUUUCACCC
SEQ ID NO: 753 - DsiRNA 373 passenger (sense) strand
UGAAACCCCAUCUCUACUAAAAAAT
SEQ ID NO: 754 - DsiRNA 373 guide (antisense) strand
AUUUUUUAGUAGAGAUGGGGUUUCACC
SEQ ID NO: 755 - DsiRNA 374 passenger (sense) strand
GAAACCCCAUCUCUACUAAAAAATG
SEQ ID NO: 756 - DsiRNA 374 guide (antisense) strand
CAUUUUUUAGUAGAGAUGGGGUUUCAC
SEQ ID NO: 757 - DsiRNA 375 guide (antisense) strand
AAACCCCAUCUCUACUAAAAAAUGC
SEQ ID NO: 758 - DsiRNA 375 guide (antisense) strand
GCAUUUUUUAGUAGAGAUGGGGUUUCA
SEQ ID NO: 759 - DsiRNA 376 passenger (sense) strand
AACCCCAUCUCUACUAAAAAAUGCA
SEQ ID NO: 760 - DsiRNA 376 guide (antisense) strand
UGCAUUUUUUAGUAGAGAUGGGGUUUC
SEQ ID NO: 761 - DsiRNA 377 passenger (sense) strand
CCCAUCUCUACUAAAAAAUGCAAAA
SEQ ID NO: 762 - DsiRNA 377 guide (antisense) strand
UUUUGCAUUUUUUAGUAGAGAUGGGGU
SEQ ID NO: 763 - DsiRNA 378 passenger (sense) strand
AUCAAAACCCUUAUGGCAGACUGTT
SEQ ID NO: 764 - DsiRNA 378 guide (antisense) strand
AACAGUCUGCCAUAAGGGUUUUGAUAU
SEQ ID NO: 765 - DsiRNA 379 passenger (sense) strand
UAUUUUAUUUGUCGUGCUUAUAUGT
SEQ ID NO: 766 - DsiRNA 379 guide (antisense) strand
ACAUAUAAGCACGACAAAUAAAAUACA
SEQ ID NO: 767 - DsiRNA 380 passenger (sense) strand
GUGUUGCCCAAGUUUCUAUGGUGAA
SEQ ID NO: 768 - DsiRNA 380 guide (antisense) strand
UUCACCAUAGAAACUUGGGCAACACAU
SEQ ID NO: 769 - DsiRNA 381 passenger (sense) strand
GCCCAAGUUUCUAUGGUGAACGGTA
SEQ ID NO: 770 - DsiRNA 381 guide (antisense) strand
UACCGUUCACCAUAGAAACUUGGGCAA
SEQ ID NO: 771 - DsiRNA 382 passenger (sense) strand
CCCAAGUUUCUAUGGUGAACGGUAT
SEQ ID NO: 772 - DsiRNA 382 guide (antisense) strand
AUACCGUUCACCAUAGAAACUUGGGCA
SEQ ID NO: 773 - DsiRNA 383 passenger (sense) strand
ACUUUCAGCAUGAGAAAAUAACUCC
SEQ ID NO: 774 - DsiRNA 383 guide (antisense) strand
GGAGUUAUUUUCUCAUGCUGAAAGUGA
SEQ ID NO: 775 - DsiRNA 384 passenger (sense) strand
CUUUCAGCAUGAGAAAAUAACUCCT
SEQ ID NO: 776 - DsiRNA 384 guide (antisense) strand
AGGAGUUAUUUUCUCAUGCUGAAAGUG
SEQ ID NO: 777 -PNPLA3 oligonucleotide 1 passenger (sense) strand
UGAGUGACAACGUACCCUUAGCAGCCGAAAGGCUGC
SEQ ID NO: 778 - PNPLA3 oligonucleotide 1 guide (antisense) strand
UAAGGGUACGUUGUCACUCAGG
SEQ ID NO: 779 - PNPLA3 oligonucleotide 2 passenger (sense) strand
GAGUGACAACGUACCCUUCAGCAGCCGAAAGGCUGC
SEQ ID NO: 780 - PNPLA3 oligonucleotide 2 guide (antisense) strand
UGAAGGGUACGUUGUCACUCGG
SEQ ID NO: 781 - PNPLA3 oligonucleotide 3 passenger (sense) strand
AGUGACAACGUACCCUUCAAGCAGCCGAAAGGCUGC
SEQ ID NO: 782 - PNPLA3 oligonucleotide 3 guide (antisense) strand
UUGAAGGGUACGUUGUCACUGG
SEQ ID NO: 783 - PNPLA3 oligonucleotide 4 passenger (sense) strand
UGACAACGUACCCUUCAUUAGCAGCCGAAAGGCUGC
SEQ ID NO: 784 - PNPLA3 oligonucleotide 4 guide (antisense) strand
UAAUGAAGGGUACGUUGUCAGG
SEQ ID NO: 785 - PNPLA3 oligonucleotide 5 passenger (sense) strand
GACAACGUACCCUUCAUUGAGCAGCCGAAAGGCUGC
SEQ ID NO: 786 - PNPLA3 oligonucleotide 5 guide (antisense) strand
UCAAUGAAGGGUACGUUGUCGG
SEQ ID NO: 787 - PNPLA3 oligonucleotide 6 passenger (sense) strand
CAACGUACCCUUCAUUGAUAGCAGCCGAAAGGCUGC
SEQ ID NO: 788 - PNPLA3 oligonucleotide 6 guide (antisense) strand
UAUCAAUGAAGGGUACGUUGGG
SEQ ID NO: 789 - PNPLA3 oligonucleotide 7 passenger (sense) strand
AACGUACCCUUCAUUGAUGAGCAGCCGAAAGGCUGC
SEQ ID NO: 790 - PNPLA3 oligonucleotide 7 guide (antisense) strand
UCAUCAAUGAAGGGUACGUUGG
SEQ ID NO: 791 - PNPLA3 oligonucleotide 8 passenger (sense) strand
ACGUACCCUUCAUUGAUGCAGCAGCCGAAAGGCUGC
SEQ ID NO: 792 - PNPLA3 oligonucleotide 8 guide (antisense) strand
UGCAUCAAUGAAGGGUACGUGG
SEQ ID NO: 793 - PNPLA3 oligonucleotide 9 passenger (sense) strand
CGUACCCUUCAUUGAUGCCAGCAGCCGAAAGGCUGC
SEQ ID NO: 794 - PNPLA3 oligonucleotide 9 guide (antisense) strand
UGGCAUCAAUGAAGGGUACGGG
SEQ ID NO: 795 - PNPLA3 oligonucleotide 10 passenger (sense) strand
UACCCUUCAUUGAUGCCAAAGCAGCCGAAAGGCUGC
SEQ ID NO: 796 - PNPLA3 oligonucleotide 10 guide (antisense) strand
UUUGGCAUCAAUGAAGGGUAGG
SEQ ID NO: 797 - PNPLA3 oligonucleotide 11 passenger (sense) strand
CACGAACUUUCUUCAUGUGAGCAGCCGAAAGGCUGC
SEQ ID NO: 798 - PNPLA3 oligonucleotide 11 guide (antisense) strand
UCACAUGAAGAAAGUUCGUGGG
SEQ ID NO: 799 - PNPLA3 oligonucleotide 12 passenger (sense) strand
ACGAACUUUCUUCAUGUGGAGCAGCCGAAAGGCUGC
SEQ ID NO: 800 - PNPLA3 oligonucleotide 12 guide (antisense) strand
UCCACAUGAAGAAAGUUCGUGG
SEQ ID NO: 801 - PNPLA3 oligonucleotide 13 passenger (sense) strand
CGAACUUUCUUCAUGUGGAAGCAGCCGAAAGGCUGC
SEQ ID NO: 802 - PNPLA3 oligonucleotide 13 guide (antisense) strand
UUCCACAUGAAGAAAGUUCGGG
SEQ ID NO: 803 - PNPLA3 oligonucleotide 14 passenger (sense) strand
ACUUUCUUCAUGUGGACAUAGCAGCCGAAAGGCUGC
SEQ ID NO: 804 - PNPLA3 oligonucleotide 14 guide (antisense) strand
UAUGUCCACAUGAAGAAAGUGG
SEQ ID NO: 805 - PNPLA3 oligonucleotide 15 passenger (sense) strand
UUUCUUCAUGUGGACAUCAAGCAGCCGAAAGGCUGC
SEQ ID NO: 806 - PNPLA3 oligonucleotide 15 guide (antisense) strand
UUGAUGUCCACAUGAAGAAAGG
SEQ ID NO: 807 - PNPLA3 oligonucleotide 16 passenger (sense) strand
CUUCAUGUGGACAUCACCAAGCAGCCGAAAGGCUGC
SEQ ID NO: 808 - PNPLA3 oligonucleotide 16 guide (antisense) strand
UUGGUGAUGUCCACAUGAAGGG
SEQ ID NO: 809 - PNPLA3 oligonucleotide 17 passenger (sense) strand
AUGUGGACAUCACCAAGCUAGCAGCCGAAAGGCUGC
SEQ ID NO: 810 - PNPLA3 oligonucleotide 17 guide (antisense) strand
UAGCUUGGUGAUGUCCACAUGG
SEQ ID NO: 811 -PNPLA3 oligonucleotide 18 passenger (sense) strand
UGUGGACAUCACCAAGCUCAGCAGCCGAAAGGCUGC
SEQ ID NO: 812 - PNPLA3 oligonucleotide 18 guide (antisense) strand
UGAGCUUGGUGAUGUCCACAGG
SEQ ID NO: 813 - PNPLA3 oligonucleotide 19 passenger (sense) strand
GUGGACAUCACCAAGCUCAAGCAGCCGAAAGGCUGC
SEQ ID NO: 814 - PNPLA3 oligonucleotide 19 guide (antisense) strand
UUGAGCUUGGUGAUGUCCACGG
SEQ ID NO: 815 - PNPLA3 oligonucleotide 20 passenger (sense) strand
UGGACAUCACCAAGCUCAGAGCAGCCGAAAGGCUGC
SEQ ID NO: 816 - PNPLA3 oligonucleotide 20 guide (antisense) strand
UCUGAGCUUGGUGAUGUCCAGG
SEQ ID NO: 817 - PNPLA3 oligonucleotide 21 passenger (sense) strand
AGAUAUGCCUUCGAGGAUAAGCAGCCGAAAGGCUGC
SEQ ID NO: 818 - PNPLA3 oligonucleotide 21 guide (antisense) strand
UUAUCCUCGAAGGCAUAUCUGG
SEQ ID NO: 819 - PNPLA3 oligonucleotide 22 passenger (sense) strand
AUGCCUUCGAGGAUAUUUGAGCAGCCGAAAGGCUGC
SEQ ID NO: 820 - PNPLA3 oligonucleotide 22 guide (antisense) strand
UCAAAUAUCCUCGAAGGCAUGG
SEQ ID NO: 821 - PNPLA3 oligonucleotide 23 passenger (sense) strand
GCCUUCGAGGAUAUUUGGAAGCAGCCGAAAGGCUGC
SEQ ID NO: 822 - PNPLA3 oligonucleotide 23 guide (antisense) strand
UUCCAAAUAUCCUCGAAGGCGG
SEQ ID NO: 823 - PNPLA3 oligonucleotide 24 passenger (sense) strand
UGAAGUCAUCCUCAGAAGGAGCAGCCGAAAGGCUGC
SEQ ID NO: 824 - PNPLA3 oligonucleotide 24 guide (antisense) strand
UCCUUCUGAGGAUGACUUCAGG
SEQ ID NO: 825 - PNPLA3 oligonucleotide 25 passenger (sense) strand
GAAGUCAUCCUCAGAAGGGAGCAGCCGAAAGGCUGC
SEQ ID NO: 826 - PNPLA3 oligonucleotide 25 guide (antisense) strand
UCCCUUCUGAGGAUGACUUCGG
SEQ ID NO: 827 - PNPLA3 oligonucleotide 26 passenger (sense) strand
AUCCUCAGAAGGGAUGGAUAGCAGCCGAAAGGCUGC
SEQ ID NO: 828 - PNPLA3 oligonucleotide 26 guide (antisense) strand
UAUCCAUCCCUUCUGAGGAUGG
SEQ ID NO: 829 - PNPLA3 oligonucleotide 27 passenger (sense) strand
AGUGAAGAAAUGAAAGACAAGCAGCCGAAAGGCUGC
SEQ ID NO: 830 - PNPLA3 oligonucleotide 27 guide (antisense) strand
UUGUCUUUCAUUUCUUCACUGG
SEQ ID NO: 831 - PNPLA3 oligonucleotide 28 passenger (sense) strand
AAGAAAUGAAAGACAAAGGAGCAGCCGAAAGGCUGC
SEQ ID NO: 832 - PNPLA3 oligonucleotide 28 guide (antisense) strand
UCCUUUGUCUUUCAUUUCUUGG
SEQ ID NO: 833 - PNPLA3 oligonucleotide 29 passenger (sense) strand
AGAAAUGAAAGACAAAGGUAGCAGCCGAAAGGCUGC
SEQ ID NO: 834 - PNPLA3 oligonucleotide 29 guide (antisense) strand
UACCUUUGUCUUUCAUUUCUGG
SEQ ID NO: 835 - PNPLA3 oligonucleotide 30 passenger (sense) strand
GAAAUGAAAGACAAAGGUGAGCAGCCGAAAGGCUGC
SEQ ID NO: 836 - PNPLA3 oligonucleotide 30 guide (antisense) strand
UCACCUUUGUCUUUCAUUUCGG
SEQ ID NO: 837 - PNPLA3 oligonucleotide 31 passenger (sense) strand
AAAUGAAAGACAAAGGUGGAGCAGCCGAAAGGCUGC
SEQ ID NO: 838 - PNPLA3 oligonucleotide 31 guide (antisense) strand
UCCACCUUUGUCUUUCAUUUGG
SEQ ID NO: 839 - PNPLA3 oligonucleotide 32 passenger (sense) strand
AAUGAAAGACAAAGGUGGAAGCAGCCGAAAGGCUGC
SEQ ID NO: 840 - PNPLA3 oligonucleotide 32 guide (antisense) strand
UUCCACCUUUGUCUUUCAUUGG
SEQ ID NO: 841 - PNPLA3 oligonucleotide 33 passenger (sense) strand
AUGAAAGACAAAGGUGGAUAGCAGCCGAAAGGCUGC
SEQ ID NO: 842 - PNPLA3 oligonucleotide 33 guide (antisense) strand
UAUCCACCUUUGUCUUUCAUGG
SEQ ID NO: 843 - PNPLA3 oligonucleotide 34 passenger (sense) strand
UGAAAGACAAAGGUGGAUAAGCAGCCGAAAGGCUGC
SEQ ID NO: 844 - PNPLA3 oligonucleotide 34 guide (antisense) strand
UUAUCCACCUUUGUCUUUCAGG
SEQ ID NO: 845 - PNPLA3 oligonucleotide 35 passenger (sense) strand
GAAAGACAAAGGUGGAUACAGCAGCCGAAAGGCUGC
SEQ ID NO: 846 - PNPLA3 oligonucleotide 35 guide (antisense) strand
UGUAUCCACCUUUGUCUUUCGG
SEQ ID NO: 847 - PNPLA3 oligonucleotide 36 passenger (sense) strand
AAGACAAAGGUGGAUACAUAGCAGCCGAAAGGCUGC
SEQ ID NO: 848 - PNPLA3 oligonucleotide 36 guide (antisense) strand
UAUGUAUCCACCUUUGUCUUGG
SEQ ID NO: 849 - PNPLA3 oligonucleotide 37 passenger (sense) strand
AGACAAAGGUGGAUACAUGAGCAGCCGAAAGGCUGC
SEQ ID NO: 850 - PNPLA3 oligonucleotide 37 guide (antisense) strand
UCAUGUAUCCACCUUUGUCUGG
SEQ ID NO: 851 - PNPLA3 oligonucleotide 38 passenger (sense) strand
GACAAAGGUGGAUACAUGAAGCAGCCGAAAGGCUGC
SEQ ID NO: 852 - PNPLA3 oligonucleotide 38 guide (antisense) strand
UUCAUGUAUCCACCUUUGUCGG
SEQ ID NO: 853 - PNPLA3 oligonucleotide 39 passenger guide (sense) strand
ACAAAGGUGGAUACAUGAGAGCAGCCGAAAGGCUGC
SEQ ID NO: 854 - PNPLA3 oligonucleotide 39 guide (antisense) strand
UCUCAUGUAUCCACCUUUGUGG
SEQ ID NO: 855 - PNPLA3 oligonucleotide 40 passenger (sense) strand
AAGGUGGAUACAUGAGCAAAGCAGCCGAAAGGCUGC
SEQ ID NO: 856 - PNPLA3 oligonucleotide 40 guide (antisense) strand
UUUGCUCAUGUAUCCACCUUGG
SEQ ID NO: 857 - PNPLA3 oligonucleotide 41 passenger (sense) strand
AGGUGGAUACAUGAGCAAGAGCAGCCGAAAGGCUGC
SEQ ID NO: 858 - PNPLA3 oligonucleotide 41 guide (antisense) strand
UCUUGCUCAUGUAUCCACCUGG
SEQ ID NO: 859 - PNPLA3 oligonucleotide 42 passenger (sense) strand
UGGAUACAUGAGCAAGAUUAGCAGCCGAAAGGCUGC
SEQ ID NO: 860 - PNPLA3 oligonucleotide 42 guide (antisense) strand
UAAUCUUGCUCAUGUAUCCAGG
SEQ ID NO: 861 - PNPLA3 oligonucleotide 43 passenger (sense) strand
GGAUACAUGAGCAAGAUUUAGCAGCCGAAAGGCUGC
SEQ ID NO: 862 - PNPLA3 oligonucleotide 43 guide (antisense) strand
UAAAUCUUGCUCAUGUAUCCGG
SEQ ID NO: 863 - PNPLA3 oligonucleotide 44 passenger (sense) strand
GAUACAUGAGCAAGAUUUGAGCAGCCGAAAGGCUGC
SEQ ID NO: 864 - PNPLA3 oligonucleotide 44 guide (antisense) strand
UCAAAUCUUGCUCAUGUAUCGG
SEQ ID NO: 865 - PNPLA3 oligonucleotide 45 passenger (sense) strand
AUACAUGAGCAAGAUUUGCAGCAGCCGAAAGGCUGC
SEQ ID NO: 866 - PNPLA3 oligonucleotide 45 guide (antisense) strand
UGCAAAUCUUGCUCAUGUAUGG
SEQ ID NO: 867 - PNPLA3 oligonucleotide 46 passenger (sense) strand
UACAUGAGCAAGAUUUGCAAGCAGCCGAAAGGCUGC
SEQ ID NO: 868 - PNPLA3 oligonucleotide 46 guide (antisense) strand
UUGCAAAUCUUGCUCAUGUAGG
SEQ ID NO: 869 - PNPLA3 oligonucleotide 47 passenger (sense) strand
ACAUGAGCAAGAUUUGCAAAGCAGCCGAAAGGCUGC
SEQ ID NO: 870 - PNPLA3 oligonucleotide 47 guide (antisense) strand
UUUGCAAAUCUUGCUCAUGUGG
SEQ ID NO: 871 - PNPLA3 oligonucleotide 48 passenger (sense) strand
UGAGCAAGAUUUGCAACUUAGCAGCCGAAAGGCUGC
SEQ ID NO: 872 - PNPLA3 oligonucleotide 48 guide (antisense) strand
UAAGUUGCAAAUCUUGCUCAGG
SEQ ID NO: 873 - PNPLA3 oligonucleotide 49 passenger (sense) strand
GAGCAAGAUUUGCAACUUGAGCAGCCGAAAGGCUGC
SEQ ID NO: 874 - PNPLA3 oligonucleotide 49 guide (antisense) strand
UCAAGUUGCAAAUCUUGCUCGG
SEQ ID NO: 875 - PNPLA3 oligonucleotide 50 passenger (sense) strand
AGCAAGAUUUGCAACUUGCAGCAGCCGAAAGGCUGC
SEQ ID NO: 876 - PNPLA3 oligonucleotide 50 guide (antisense) strand
UGCAAGUUGCAAAUCUUGCUGG
SEQ ID NO: 877 - PNPLA3 oligonucleotide 51 passenger (sense) strand
GCAAGAUUUGCAACUUGCUAGCAGCCGAAAGGCUGC
SEQ ID NO: 878 - PNPLA3 oligonucleotide 51 guide (antisense) strand
UAGCAAGUUGCAAAUCUUGCGG
SEQ ID NO: 879 - PNPLA3 oligonucleotide 52 passenger (sense) strand
CAAGAUUUGCAACUUGCUAAGCAGCCGAAAGGCUGC
SEQ ID NO: 880 - PNPLA3 oligonucleotide 52 guide (antisense) strand
UUAGCAAGUUGCAAAUCUUGGG
SEQ ID NO: 881 - PNPLA3 oligonucleotide 53 passenger (sense) strand
AAGAUUUGCAACUUGCUACAGCAGCCGAAAGGCUGC
SEQ ID NO: 882 - PNPLA3 oligonucleotide 53 guide (antisense) strand
UGUAGCAAGUUGCAAAUCUUGG
SEQ ID NO: 883 - PNPLA3 oligonucleotide 54 passenger (sense) strand
AGAUUUGCAACUUGCUACCAGCAGCCGAAAGGCUGC
SEQ ID NO: 884 - PNPLA3 oligonucleotide 54 guide (antisense) strand
UGGUAGCAAGUUGCAAAUCUGG
SEQ ID NO: 885 - PNPLA3 oligonucleotide 55 passenger (sense) strand
AUUUGCAACUUGCUACCCAAGCAGCCGAAAGGCUGC
SEQ ID NO: 886 - PNPLA3 oligonucleotide 55 guide (antisense) strand
UUGGGUAGCAAGUUGCAAAUGG
SEQ ID NO: 887 - PNPLA3 oligonucleotide 56 passenger (sense) strand
UUGCAACUUGCUACCCAUUAGCAGCCGAAAGGCUGC
SEQ ID NO: 888 - PNPLA3 oligonucleotide 56 guide (antisense) strand
UAAUGGGUAGCAAGUUGCAAGG
SEQ ID NO: 889 - PNPLA3 oligonucleotide 57 passenger (sense) strand
UGCAACUUGCUACCCAUUAAGCAGCCGAAAGGCUGC
SEQ ID NO: 890 - PNPLA3 oligonucleotide 57 guide (antisense) strand
UUAAUGGGUAGCAAGUUGCAGG
SEQ ID NO: 891 - PNPLA3 oligonucleotide 58 passenger (sense) strand
GCAACUUGCUACCCAUUAGAGCAGCCGAAAGGCUGC
SEQ ID NO: 892 - PNPLA3 oligonucleotide 58 guide (antisense) strand
UCUAAUGGGUAGCAAGUUGCGG
SEQ ID NO: 893 - PNPLA3 oligonucleotide 59 passenger (sense) strand
CAACUUGCUACCCAUUAGGAGCAGCCGAAAGGCUGC
SEQ ID NO: 894 - PNPLA3 oligonucleotide 59 guide (antisense) strand
UCCUAAUGGGUAGCAAGUUGGG
SEQ ID NO: 895 - PNPLA3 oligonucleotide 60 passenger (sense) strand
CUUGCUACCCAUUAGGAUAAGCAGCCGAAAGGCUGC
SEQ ID NO: 896 - PNPLA3 oligonucleotide 60 guide (antisense) strand
UUAUCCUAAUGGGUAGCAAGGG
SEQ ID NO: 897 - PNPLA3 oligonucleotide 61 passenger (sense) strand
UGCUACCCAUUAGGAUAAUAGCAGCCGAAAGGCUGC
SEQ ID NO: 898 - PNPLA3 oligonucleotide 61 guide (antisense) strand
UAUUAUCCUAAUGGGUAGCAGG
SEQ ID NO: 899 - PNPLA3 oligonucleotide 62 passenger (sense) strand
AUUAGGAUAAUGUCUUAUGAGCAGCCGAAAGGCUGC
SEQ ID NO: 900 - PNPLA3 oligonucleotide 62 guide (antisense) strand
UCAUAAGACAUUAUCCUAAUGG
SEQ ID NO: 901 - PNPLA3 oligonucleotide 63 passenger (sense) strand
UUAGGAUAAUGUCUUAUGUAGCAGCCGAAAGGCUGC
SEQ ID NO: 902 - PNPLA3 oligonucleotide 63 guide (antisense) strand
UACAUAAGACAUUAUCCUAAGG
SEQ ID NO: 903 - PNPLA3 oligonucleotide 64 passenger (sense) strand
UGCGAUUGUCCAGAGACUGAGCAGCCGAAAGGCUGC
SEQ ID NO: 904 - PNPLA3 oligonucleotide 64 guide (antisense) strand
UCAGUCUCUGGACAAUCGCAGG
SEQ ID NO: 905 - PNPLA3 oligonucleotide 65 passenger (sense) strand
CGAUUGUCCAGAGACUGGUAGCAGCCGAAAGGCUGC
SEQ ID NO: 906 - PNPLA3 oligonucleotide 65 guide (antisense) strand
UACCAGUCUCUGGACAAUCGGG
SEQ ID NO: 907 - PNPLA3 oligonucleotide 66 passenger (sense) strand
GUCCAGAGACUGGUGACAUAGCAGCCGAAAGGCUGC
SEQ ID NO: 908 - PNPLA3 oligonucleotide 66 guide (antisense) strand
UAUGUCACCAGUCUCUGGACGG
SEQ ID NO: 909 - PNPLA3 oligonucleotide 67 passenger (sense) strand
AGAGACUGGUGACAUGGCUAGCAGCCGAAAGGCUGC
SEQ ID NO: 910 - PNPLA3 oligonucleotide 67 guide (antisense) strand
UAGCCAUGUCACCAGUCUCUGG
SEQ ID NO: 911 - PNPLA3 oligonucleotide 68 passenger (sense) strand
ACUGGUGACAUGGCUUCCAAGCAGCCGAAAGGCUGC
SEQ ID NO: 912 - PNPLA3 oligonucleotide 68 guide (antisense) strand
UUGGAAGCCAUGUCACCAGUGG
SEQ ID NO: 913 - PNPLA3 oligonucleotide 69 passenger (sense) strand
CUCCACCUUUCCCAGUUUUAGCAGCCGAAAGGCUGC
SEQ ID NO: 914 - PNPLA3 oligonucleotide 69 guide (antisense) strand
UAAAACUGGGAAAGGUGGAGGG
SEQ ID NO: 915 - PNPLA3 oligonucleotide 70 passenger (sense) strand
CACCUUUCCCAGUUUUUCAAGCAGCCGAAAGGCUGC
SEQ ID NO: 916 - PNPLA3 oligonucleotide 70 guide (antisense) strand
UUGAAAAACUGGGAAAGGUGGG
SEQ ID NO: 917 - PNPLA3 oligonucleotide 71 passenger (sense) strand
AGUUUUUCACUAGAGAAGAAGCAGCCGAAAGGCUGC
SEQ ID NO: 918 - PNPLA3 oligonucleotide 71 guide (antisense) strand
UUCUUCUCUAGUGAAAAACUGG
SEQ ID NO: 919 - PNPLA3 oligonucleotide 72 passenger (sense) strand
AGCAGAUUCUUUCAGAGGUAGCAGCCGAAAGGCUGC
SEQ ID NO: 920 - PNPLA3 oligonucleotide 72 guide (antisense) strand
UACCUCUGAAAGAAUCUGCUGG
SEQ ID NO: 921 - PNPLA3 oligonucleotide 73 passenger (sense) strand
GCAGAUUCUUUCAGAGGUGAGCAGCCGAAAGGCUGC
SEQ ID NO: 922 - PNPLA3 oligonucleotide 73 guide (antisense) strand
UCACCUCUGAAAGAAUCUGCGG
SEQ ID NO: 923 - PNPLA3 oligonucleotide 74 passenger (sense) strand
AGAUUCUUUCAGAGGUGCUAGCAGCCGAAAGGCUGC
SEQ ID NO: 924 - PNPLA3 oligonucleotide 74 guide (antisense) strand
UAGCACCUCUGAAAGAAUCUGG
SEQ ID NO: 925 - PNPLA3 oligonucleotide 75 passenger (sense) strand
AGGUGCUAAAGUUUCCCAUAGCAGCCGAAAGGCUGC
SEQ ID NO: 926 - PNPLA3 oligonucleotide 75 guide (antisense) strand
UAUGGGAAACUUUAGCACCUGG
SEQ ID NO: 927 - PNPLA3 oligonucleotide 76 passenger (sense) strand
AAAGUUUCCCAUCUUUGUGAGCAGCCGAAAGGCUGC
SEQ ID NO: 928 - PNPLA3 oligonucleotide 76 guide (antisense) strand
UCACAAAGAUGGGAAACUUUGG
SEQ ID NO: 929 - PNPLA3 oligonucleotide 77 passenger (sense) strand
AGUUUCCCAUCUUUGUGCAAGCAGCCGAAAGGCUGC
SEQ ID NO: 930 - PNPLA3 oligonucleotide 77 guide (antisense) strand
UUGCACAAAGAUGGGAAACUGG
SEQ ID NO: 931 - PNPLA3 oligonucleotide 78 passenger (sense) strand
AGCCUCUGAGCUGAGUUGGAGCAGCCGAAAGGCUGC
SEQ ID NO: 932 - PNPLA3 oligonucleotide 78 guide (antisense) strand
UCCAACUCAGCUCAGAGGCUGG
SEQ ID NO: 933 - PNPLA3 oligonucleotide 79 passenger (sense) strand
GCCUCUGAGCUGAGUUGGUAGCAGCCGAAAGGCUGC
SEQ ID NO: 934 - PNPLA3 oligonucleotide 79 guide (antisense) strand
UACCAACUCAGCUCAGAGGCGG
SEQ ID NO: 935 - PNPLA3 oligonucleotide 80 passenger (sense) strand
CCUCUGAGCUGAGUUGGUUAGCAGCCGAAAGGCUGC
SEQ ID NO: 936 - PNPLA3 oligonucleotide 80 guide (antisense) strand
UAACCAACUCAGCUCAGAGGGG
SEQ ID NO: 937 - PNPLA3 oligonucleotide 81 passenger (sense) strand
CUCUGAGCUGAGUUGGUUUAGCAGCCGAAAGGCUGC
SEQ ID NO: 938 - PNPLA3 oligonucleotide 81 guide (antisense) strand
UAAACCAACUCAGCUCAGAGGG
SEQ ID NO: 939 - PNPLA3 oligonucleotide 82 passenger (sense) strand
UCUGAGCUGAGUUGGUUUUAGCAGCCGAAAGGCUGC
SEQ ID NO: 940 - PNPLA3 oligonucleotide 82 guide (antisense) strand
UAAAACCAACUCAGCUCAGAGG
SEQ ID NO: 941 - PNPLA3 oligonucleotide 83 passenger (sense) strand
UGAGCUGAGUUGGUUUUAUAGCAGCCGAAAGGCUGC
SEQ ID NO: 942 - PNPLA3 oligonucleotide 83 guide (antisense) strand
UAUAAAACCAACUCAGCUCAGG
SEQ ID NO: 943 - PNPLA3 oligonucleotide 84 passenger (sense) strand
UGAGUUGGUUUUAUGAAAAAGCAGCCGAAAGGCUGC
SEQ ID NO: 944 - PNPLA3 oligonucleotide 84 guide (antisense) strand
UUUUUCAUAAAACCAACUCAGG
SEQ ID NO: 945 - PNPLA3 oligonucleotide 85 passenger (sense) strand
GAGUUGGUUUUAUGAAAAGAGCAGCCGAAAGGCUGC
SEQ ID NO: 946 - PNPLA3 oligonucleotide 85 guide (antisense) strand
UCUUUUCAUAAAACCAACUCGG
SEQ ID NO: 947 - PNPLA3 oligonucleotide 86 passenger (sense) strand
UUGGUUUUAUGAAAAGCUAAGCAGCCGAAAGGCUGC
SEQ ID NO: 948 - PNPLA3 oligonucleotide 86 guide (antisense) strand
UUAGCUUUUCAUAAAACCAAGG
SEQ ID NO: 949 - PNPLA3 oligonucleotide 87 passenger (sense) strand
UGGUUUUAUGAAAAGCUAGAGCAGCCGAAAGGCUGC
SEQ ID NO: 950 - PNPLA3 oligonucleotide 87 guide (antisense) strand
UCUAGCUUUUCAUAAAACCAGG
SEQ ID NO: 951 - PNPLA3 oligonucleotide 88 passenger (sense) strand
GGUUUUAUGAAAAGCUAGGAGCAGCCGAAAGGCUGC
SEQ ID NO: 952 - PNPLA3 oligonucleotide 88 guide (antisense) strand
UCCUAGCUUUUCAUAAAACCGG
SEQ ID NO: 953 - PNPLA3 oligonucleotide 89 passenger (sense) strand
UUUUAUGAAAAGCUAGGAAAGCAGCCGAAAGGCUGC
SEQ ID NO: 954 - PNPLA3 oligonucleotide 89 guide (antisense) strand
UUUCCUAGCUUUUCAUAAAAGG
SEQ ID NO: 955 - PNPLA3 oligonucleotide 90 passenger (sense) strand
UAUGAAAAGCUAGGAAGCAAGCAGCCGAAAGGCUGC
SEQ ID NO: 956 - PNPLA3 oligonucleotide 90 guide (antisense) strand
UUGCUUCCUAGCUUUUCAUAGG
SEQ ID NO: 957 - PNPLA3 oligonucleotide 91 passenger (sense) strand
AUGAAAAGCUAGGAAGCAAAGCAGCCGAAAGGCUGC
SEQ ID NO: 958 - PNPLA3 oligonucleotide 91 guide (antisense) strand
UUUGCUUCCUAGCUUUUCAUGG
SEQ ID NO: 959 - PNPLA3 oligonucleotide 92 passenger (sense) strand
CCAGCACUUAACUCUAAUAAGCAGCCGAAAGGCUGC
SEQ ID NO: 960 - PNPLA3 oligonucleotide 92 guide (antisense) strand
UUAUUAGAGUUAAGUGCUGGGG
SEQ ID NO: 961 - PNPLA3 oligonucleotide 93 passenger (sense) strand
CAGCACUUAACUCUAAUACAGCAGCCGAAAGGCUGC
SEQ ID NO: 962 - PNPLA3 oligonucleotide 93 guide (antisense) strand
UGUAUUAGAGUUAAGUGCUGGG
SEQ ID NO: 963 - PNPLA3 oligonucleotide 94 passenger (sense) strand
UAAUACAUCAGCAUGCGUUAGCAGCCGAAAGGCUGC
SEQ ID NO: 964 - PNPLA3 oligonucleotide 94 guide (antisense) strand
UAACGCAUGCUGAUGUAUUAGG
SEQ ID NO: 965 - PNPLA3 oligonucleotide 95 passenger (sense) strand
AAUACAUCAGCAUGCGUUAAGCAGCCGAAAGGCUGC
SEQ ID NO: 966 - PNPLA3 oligonucleotide 95 guide (antisense) strand
UUAACGCAUGCUGAUGUAUUGG
SEQ ID NO: 967 - PNPLA3 oligonucleotide 96 passenger (sense) strand
UGCGUUAAUUCAGCUGGUUAGCAGCCGAAAGGCUGC
SEQ ID NO: 968 - PNPLA3 oligonucleotide 96 guide (antisense) strand
UAACCAGCUGAAUUAACGCAGG
SEQ ID NO: 969 - PNPLA3 oligonucleotide 97 passenger (sense) strand
GCGUUAAUUCAGCUGGUUGAGCAGCCGAAAGGCUGC
SEQ ID NO: 970 - PNPLA3 oligonucleotide 97 guide (antisense) strand
UCAACCAGCUGAAUUAACGCGG
SEQ ID NO: 971 - PNPLA3 oligonucleotide 98 passenger (sense) strand
CGUUAAUUCAGCUGGUUGGAGCAGCCGAAAGGCUGC
SEQ ID NO: 972 - PNPLA3 oligonucleotide 98 guide (antisense) strand
UCCAACCAGCUGAAUUAACGGG
SEQ ID NO: 973 - PNPLA3 oligonucleotide 99 passenger (sense) strand
UUAAUUCAGCUGGUUGGGAAGCAGCCGAAAGGCUGC
SEQ ID NO: 974 - PNPLA3 oligonucleotide 99 guide (antisense) strand
UUCCCAACCAGCUGAAUUAAGG
SEQ ID NO: 975 - PNPLA3 oligonucleotide 100 passenger (sense) strand
UAAUUCAGCUGGUUGGGAAAGCAGCCGAAAGGCUGC
SEQ ID NO: 976 - PNPLA3 oligonucleotide 100 guide (antisense) strand
UUUCCCAACCAGCUGAAUUAGG
SEQ ID NO: 977 - PNPLA3 oligonucleotide 101 passenger (sense) strand
GCAGAGGGUCCCUUACUGAAGCAGCCGAAAGGCUGC
SEQ ID NO: 978 - PNPLA3 oligonucleotide 101 guide (antisense) strand
UUCAGUAAGGGACCCUCUGCGG
SEQ ID NO: 979 - PNPLA3 oligonucleotide 102 passenger (sense) strand
CUAUUAAUGGUCAGACUGUAGCAGCCGAAAGGCUGC
SEQ ID NO: 980 - PNPLA3 oligonucleotide 102 guide (antisense) strand
UACAGUCUGACCAUUAAUAGGG
SEQ ID NO: 981 - PNPLA3 oligonucleotide 103 passenger (sense) strand
UAUUAAUGGUCAGACUGUUAGCAGCCGAAAGGCUGC
SEQ ID NO: 982 - PNPLA3 oligonucleotide 103 guide (antisense) strand
UAACAGUCUGACCAUUAAUAGG
SEQ ID NO: 983 - PNPLA3 oligonucleotide 104 passenger (sense) strand
AUUAAUGGUCAGACUGUUCAGCAGCCGAAAGGCUGC
SEQ ID NO: 984 - PNPLA3 oligonucleotide 104 guide (antisense) strand
UGAACAGUCUGACCAUUAAUGG
SEQ ID NO: 985 - PNPLA3 oligonucleotide 105 passenger (sense) strand
UUAAUGGUCAGACUGUUCCAGCAGCCGAAAGGCUGC
SEQ ID NO: 986 - PNPLA3 oligonucleotide 105 guide (antisense) strand
UGGAACAGUCUGACCAUUAAGG
SEQ ID NO: 987 - PNPLA3 oligonucleotide 106 passenger (sense) strand
UAAUGGUCAGACUGUUCCAAGCAGCCGAAAGGCUGC
SEQ ID NO: 988 - PNPLA3 oligonucleotide 106 guide (antisense) strand
UUGGAACAGUCUGACCAUUAGG
SEQ ID NO: 989 - PNPLA3 oligonucleotide 107 passenger (sense) strand
AAUGGUCAGACUGUUCCAGAGCAGCCGAAAGGCUGC
SEQ ID NO: 990 - PNPLA3 oligonucleotide 107 guide (antisense) strand
UCUGGAACAGUCUGACCAUUGG
SEQ ID NO: 991 - PNPLA3 oligonucleotide 108 passenger (sense) strand
AGAACACCUUUUUCACCUAAGCAGCCGAAAGGCUGC
SEQ ID NO: 992 - PNPLA3 oligonucleotide 108 guide (antisense) strand
UUAGGUGAAAAAGGUGUUCUGG
SEQ ID NO: 993 - PNPLA3 oligonucleotide 109 passenger (sense) strand
GAACACCUUUUUCACCUAAAGCAGCCGAAAGGCUGC
SEQ ID NO: 994 - PNPLA3 oligonucleotide 109 guide (antisense) strand
UUUAGGUGAAAAAGGUGUUCGG
SEQ ID NO: 995 - PNPLA3 oligonucleotide 110 passenger (sense) strand
AACACCUUUUUCACCUAACAGCAGCCGAAAGGCUGC
SEQ ID NO: 996 - PNPLA3 oligonucleotide 110 guide (antisense) strand
UGUUAGGUGAAAAAGGUGUUGG
SEQ ID NO: 997 - PNPLA3 oligonucleotide 111 passenger (sense) strand
ACACCUUUUUCACCUAACUAGCAGCCGAAAGGCUGC
SEQ ID NO: 998 - PNPLA3 oligonucleotide 111 guide (antisense) strand
UAGUUAGGUGAAAAAGGUGUGG
SEQ ID NO: 999 - PNPLA3 oligonucleotide 112 passenger (sense) strand
CACCUUUUUCACCUAACUAAGCAGCCGAAAGGCUGC
SEQ ID NO: 1000 - PNPLA3 oligonucleotide 112 guide (antisense) strand
UUAGUUAGGUGAAAAAGGUGGG
SEQ ID NO: 1001 - PNPLA3 oligonucleotide 113 passenger (sense) strand
ACCUUUUUCACCUAACUAAAGCAGCCGAAAGGCUGC
SEQ ID NO: 1002 - PNPLA3 oligonucleotide 113 guide (antisense) strand
UUUAGUUAGGUGAAAAAGGUGG
SEQ ID NO: 1003 - PNPLA3 oligonucleotide 114 passenger (sense) strand
CUUUUUCACCUAACUAAAAAGCAGCCGAAAGGCUGC
SEQ ID NO: 1004 - PNPLA3 oligonucleotide 114 guide (antisense) strand
UUUUUAGUUAGGUGAAAAAGGG
SEQ ID NO: 1005 - PNPLA3 oligonucleotide 115 passenger (sense) strand
UUUUCACCUAACUAAAAUAAGCAGCCGAAAGGCUGC
SEQ ID NO: 1006 - PNPLA3 oligonucleotide 115 guide (antisense) strand
UUAUUUUAGUUAGGUGAAAAGG
SEQ ID NO: 1007 - PNPLA3 oligonucleotide 116 passenger (sense) strand
UUCACCUAACUAAAAUAAUAGCAGCCGAAAGGCUGC
SEQ ID NO: 1008 - PNPLA3 oligonucleotide 116 guide (antisense) strand
UAUUAUUUUAGUUAGGUGAAGG
SEQ ID NO: 1009 - PNPLA3 oligonucleotide 117 passenger (sense) strand
UCACCUAACUAAAAUAAUGAGCAGCCGAAAGGCUGC
SEQ ID NO: 1010 - PNPLA3 oligonucleotide 117 guide (antisense) strand
UCAUUAUUUUAGUUAGGUGAGG
SEQ ID NO: 1011 -PNPLA3 oligonucleotide 118 passenger (sense) strand
CACCUAACUAAAAUAAUGUAGCAGCCGAAAGGCUGC
SEQ ID NO: 1012 - PNPLA3 oligonucleotide 118 guide (antisense) strand
UACAUUAUUUUAGUUAGGUGGG
SEQ ID NO: 1013 - PNPLA3 oligonucleotide 119 passenger (sense) strand
ACCUAACUAAAAUAAUGUUAGCAGCCGAAAGGCUGC
SEQ ID NO: 1014 - PNPLA3 oligonucleotide 119 guide (antisense) strand
UAACAUUAUUUUAGUUAGGUGG
SEQ ID NO: 1015 - PNPLA3 oligonucleotide 120 passenger (sense) strand
CCUAACUAAAAUAAUGUUUAGCAGCCGAAAGGCUGC
SEQ ID NO: 1016 - PNPLA3 oligonucleotide 120 guide (antisense) strand
UAAACAUUAUUUUAGUUAGGGG
SEQ ID NO: 1017 - PNPLA3 oligonucleotide 121 passenger (sense) strand
CUAACUAAAAUAAUGUUUAAGCAGCCGAAAGGCUGC
SEQ ID NO: 1018 - PNPLA3 oligonucleotide 121 guide (antisense) strand
UUAAACAUUAUUUUAGUUAGGG
SEQ ID NO: 1019 - PNPLA3 oligonucleotide 122 passenger (sense) strand
UAACUAAAAUAAUGUUUAAAGCAGCCGAAAGGCUGC
SEQ ID NO: 1020 - PNPLA3 oligonucleotide 122 guide (antisense) strand
UUUAAACAUUAUUUUAGUUAGG
SEQ ID NO: 1021 - PNPLA3 oligonucleotide 123 passenger (sense) strand
AACUAAAAUAAUGUUUAAAAGCAGCCGAAAGGCUGC
SEQ ID NO: 1022 - PNPLA3 oligonucleotide 123 guide (antisense) strand
UUUUAAACAUUAUUUUAGUUGG
SEQ ID NO: 1023 - PNPLA3 oligonucleotide 124 passenger (sense) strand
ACUAAAAUAAUGUUUAAAGAGCAGCCGAAAGGCUGC
SEQ ID NO: 1024 - PNPLA3 oligonucleotide 124 guide (antisense) strand
UCUUUAAACAUUAUUUUAGUGG
SEQ ID NO: 1025 - PNPLA3 oligonucleotide 125 passenger (sense) strand
CUAAAAUAAUGUUUAAAGAAGCAGCCGAAAGGCUGC
SEQ ID NO: 1026 - PNPLA3 oligonucleotide 125 guide (antisense) strand
UUCUUUAAACAUUAUUUUAGGG
SEQ ID NO: 1027 - PNPLA3 oligonucleotide 126 passenger (sense) strand
UAAAAUAAUGUUUAAAGAGAGCAGCCGAAAGGCUGC
SEQ ID NO: 1028 - PNPLA3 oligonucleotide 126 guide (antisense) strand
UCUCUUUAAACAUUAUUUUAGG
SEQ ID NO: 1029 - PNPLA3 oligonucleotide 127 passenger (sense) strand
AAGAGUUUUGUAUAAAAAUAGCAGCCGAAAGGCUGC
SEQ ID NO: 1030 - PNPLA3 oligonucleotide 127 guide (antisense) strand
UAUUUUUAUACAAAACUCUUGG
SEQ ID NO: 1031 - PNPLA3 oligonucleotide 128 passenger (sense) strand
GUUUUGUAUAAAAAUGUAAAGCAGCCGAAAGGCUGC
SEQ ID NO: 1032 - PNPLA3 oligonucleotide 128 guide (antisense) strand
UUUACAUUUUUAUACAAAACGG
SEQ ID NO: 1033 - PNPLA3 oligonucleotide 129 passenger (sense) strand
UUGUAUAAAAAUGUAAGGAAGCAGCCGAAAGGCUGC
SEQ ID NO: 1034 - PNPLA3 oligonucleotide 129 guide (antisense) strand
UUCCUUACAUUUUUAUACAAGG
SEQ ID NO: 1035 - PNPLA3 oligonucleotide 130 passenger (sense) strand
UGUAUAAAAAUGUAAGGAAAGCAGCCGAAAGGCUGC
SEQ ID NO: 1036 - PNPLA3 oligonucleotide 130 guide (antisense) strand
UUUCCUUACAUUUUUAUACAGG
SEQ ID NO: 1037 - PNPLA3 oligonucleotide 131 passenger (sense) strand
GUAUAAAAAUGUAAGGAAGAGCAGCCGAAAGGCUGC
SEQ ID NO: 1038 - PNPLA3 oligonucleotide 131 guide (antisense) strand
UCUUCCUUACAUUUUUAUACGG
SEQ ID NO: 1039 - PNPLA3 oligonucleotide 132 passenger (sense) strand
AUGUAAGGAAGCGUUGUUAAGCAGCCGAAAGGCUGC
SEQ ID NO: 1040 - PNPLA3 oligonucleotide 132 guide (antisense) strand
UUAACAACGCUUCCUUACAUGG
SEQ ID NO: 1041 - PNPLA3 oligonucleotide 133 passenger (sense) strand
UUUUGUAUUAUGUGAAUCAAGCAGCCGAAAGGCUGC
SEQ ID NO: 1042 - PNPLA3 oligonucleotide 133 guide (antisense) strand
UUGAUUCACAUAAUACAAAAGG
SEQ ID NO: 1043 - PNPLA3 oligonucleotide 134 passenger (sense) strand
UUUGUAUUAUGUGAAUCAGAGCAGCCGAAAGGCUGC
SEQ ID NO: 1044 - PNPLA3 oligonucleotide 134 guide (antisense) strand
UCUGAUUCACAUAAUACAAAGG
SEQ ID NO: 1045 - PNPLA3 oligonucleotide 135 passenger (sense) strand
UUGUAUUAUGUGAAUCAGUAGCAGCCGAAAGGCUGC
SEQ ID NO: 1046 - PNPLA3 oligonucleotide 135 guide (antisense) strand
UACUGAUUCACAUAAUACAAGG
SEQ ID NO: 1047 - PNPLA3 oligonucleotide 136 passenger (sense) strand
GUAUUAUGUGAAUCAGUGAAGCAGCCGAAAGGCUGC
SEQ ID NO: 1048 - PNPLA3 oligonucleotide 136 guide (antisense) strand
UUCACUGAUUCACAUAAUACGG
SEQ ID NO: 1049 - PNPLA3 oligonucleotide 137 passenger (sense) strand
UAUUAUGUGAAUCAGUGAGAGCAGCCGAAAGGCUGC
SEQ ID NO: 1050 - PNPLA3 oligonucleotide 137 guide (antisense) strand
UCUCACUGAUUCACAUAAUAGG
SEQ ID NO: 1051 - PNPLA3 oligonucleotide 138 passenger (sense) strand
AUUAUGUGAAUCAGUGAGAAGCAGCCGAAAGGCUGC
SEQ ID NO: 1052 - PNPLA3 oligonucleotide 138 guide (antisense) strand
UUCUCACUGAUUCACAUAAUGG
SEQ ID NO: 1053 - PNPLA3 oligonucleotide 139 passenger (sense) strand
UUAUGUGAAUCAGUGAGAUAGCAGCCGAAAGGCUGC
SEQ ID NO: 1054 - PNPLA3 oligonucleotide 139 guide (antisense) strand
UAUCUCACUGAUUCACAUAAGG
SEQ ID NO: 1055 - PNPLA3 oligonucleotide 140 passenger (sense) strand
UAUGUGAAUCAGUGAGAUGAGCAGCCGAAAGGCUGC
SEQ ID NO: 1056 - PNPLA3 oligonucleotide 140 guide (antisense) strand
UCAUCUCACUGAUUCACAUAGG
SEQ ID NO: 1057 - PNPLA3 oligonucleotide 141 passenger (sense) strand
AUGUGAAUCAGUGAGAUGUAGCAGCCGAAAGGCUGC
SEQ ID NO: 1058 - PNPLA3 oligonucleotide 141 guide (antisense) strand
UACAUCUCACUGAUUCACAUGG
SEQ ID NO: 1059 - PNPLA3 oligonucleotide 142 passenger (sense) strand
UGUGAAUCAGUGAGAUGUUAGCAGCCGAAAGGCUGC
SEQ ID NO: 1060 - PNPLA3 oligonucleotide 142 guide (antisense) strand
UAACAUCUCACUGAUUCACAGG
SEQ ID NO: 1061 - PNPLA3 oligonucleotide 143 passenger (sense) strand
GUGAAUCAGUGAGAUGUUAAGCAGCCGAAAGGCUGC
SEQ ID NO: 1062 - PNPLA3 oligonucleotide 143 guide (antisense) strand
UUAACAUCUCACUGAUUCACGG
SEQ ID NO: 1063 - PNPLA3 oligonucleotide 144 passenger (sense) strand
GUGAGAUGUUAGUAGAAUAAGCAGCCGAAAGGCUGC
SEQ ID NO: 1064 - PNPLA3 oligonucleotide 144 guide (antisense) strand
UUAUUCUACUAACAUCUCACGG
SEQ ID NO: 1065 - PNPLA3 oligonucleotide 145 passenger (sense) strand
UUUCUAUUUAUGCAUUUGAAGCAGCCGAAAGGCUGC
SEQ ID NO: 1066 - PNPLA3 oligonucleotide 145 guide (antisense) strand
UUCAAAUGCAUAAAUAGAAAGG
SEQ ID NO: 1067 - PNPLA3 oligonucleotide 146 passenger (sense) strand
CUAUUUAUGCAUUUGAGUAAGCAGCCGAAAGGCUGC
SEQ ID NO: 1068 - PNPLA3 oligonucleotide 146 guide (antisense) strand
UUACUCAAAUGCAUAAAUAGGG
SEQ ID NO: 1069 - PNPLA3 oligonucleotide 147 passenger (sense) strand
UGCUCAAACUGUUAAAUGUAGCAGCCGAAAGGCUGC
SEQ ID NO: 1070 - PNPLA3 oligonucleotide 147 guide (antisense) strand
UACAUUUAACAGUUUGAGCAGG
SEQ ID NO: 1071 - PNPLA3 oligonucleotide 148 passenger (sense) strand
GCUCAAACUGUUAAAUGUUAGCAGCCGAAAGGCUGC
SEQ ID NO: 1072 - PNPLA3 oligonucleotide 148 guide (antisense) strand
UAACAUUUAACAGUUUGAGCGG
SEQ ID NO: 1073 - PNPLA3 oligonucleotide 149 passenger (sense) strand
CUCAAACUGUUAAAUGUUGAGCAGCCGAAAGGCUGC
SEQ ID NO: 1074 - PNPLA3 oligonucleotide 149 guide (antisense) strand
UCAACAUUUAACAGUUUGAGGG
SEQ ID NO: 1075 - PNPLA3 oligonucleotide 150 passenger (sense) strand
UCAAACUGUUAAAUGUUGGAGCAGCCGAAAGGCUGC
SEQ ID NO: 1076 - PNPLA3 oligonucleotide 150 guide (antisense) strand
UCCAACAUUUAACAGUUUGAGG
SEQ ID NO: 1077 - PNPLA3 oligonucleotide 151 passenger (sense) strand
CAAACUGUUAAAUGUUGGAAGCAGCCGAAAGGCUGC
SEQ ID NO: 1078 - PNPLA3 oligonucleotide 151 guide (antisense) strand
UUCCAACAUUUAACAGUUUGGG
SEQ ID NO: 1079 - PNPLA3 oligonucleotide 152 passenger (sense) strand
AAACUGUUAAAUGUUGGAAAGCAGCCGAAAGGCUGC
SEQ ID NO: 1080 - PNPLA3 oligonucleotide 152 guide (antisense) strand
UUUCCAACAUUUAACAGUUUGG
SEQ ID NO: 1081 - PNPLA3 oligonucleotide 153 passenger (sense) strand
AACUGUUAAAUGUUGGAAAAGCAGCCGAAAGGCUGC
SEQ ID NO: 1082 - PNPLA3 oligonucleotide 153 guide (antisense) strand
UUUUCCAACAUUUAACAGUUGG
SEQ ID NO: 1083 - PNPLA3 oligonucleotide 154 passenger (sense) strand
UGUUAAAUGUUGGAAAAGAAGCAGCCGAAAGGCUGC
SEQ ID NO: 1084 - PNPLA3 oligonucleotide 154 guide (antisense) strand
UUCUUUUCCAACAUUUAACAGG
SEQ ID NO: 1085 - PNPLA3 oligonucleotide 155 passenger (sense) strand
GUUAAAUGUUGGAAAAGAAAGCAGCCGAAAGGCUGC
SEQ ID NO: 1086 - PNPLA3 oligonucleotide 155 guide (antisense) strand
UUUCUUUUCCAACAUUUAACGG
SEQ ID NO: 1087 - PNPLA3 oligonucleotide 156 passenger (sense) strand
UUAAAUGUUGGAAAAGAAAAGCAGCCGAAAGGCUGC
SEQ ID NO: 1088 - PNPLA3 oligonucleotide 156 guide (antisense) strand
UUUUCUUUUCCAACAUUUAAGG
SEQ ID NO: 1089 - PNPLA3 oligonucleotide 157 passenger (sense) strand
UAAAUGUUGGAAAAGAAAGAGCAGCCGAAAGGCUGC
SEQ ID NO: 1090 - PNPLA3 oligonucleotide 157 guide (antisense) strand
UCUUUCUUUUCCAACAUUUAGG
SEQ ID NO: 1091 - PNPLA3 oligonucleotide 158 passenger (sense) strand
AGAAAAGAGGCUACUUGUGAGCAGCCGAAAGGCUGC
SEQ ID NO: 1092 - PNPLA3 oligonucleotide 158 guide (antisense) strand
UCACAAGUAGCCUCUUUUCUGG
SEQ ID NO: 1093 - PNPLA3 oligonucleotide 159 passenger (sense) strand
GAAAAGAGGCUACUUGUGAAGCAGCCGAAAGGCUGC
SEQ ID NO: 1094 - PNPLA3 oligonucleotide 159 guide (antisense) strand
UUCACAAGUAGCCUCUUUUCGG
SEQ ID NO: 1095 - PNPLA3 oligonucleotide 160 passenger (sense) strand
AAAAGAGGCUACUUGUGAAAGCAGCCGAAAGGCUGC
SEQ ID NO: 1096 - PNPLA3 oligonucleotide 160 guide (antisense) strand
UUUCACAAGUAGCCUCUUUUGG
SEQ ID NO: 1097 - PNPLA3 oligonucleotide 161 passenger (sense) strand
AGAGGCUACUUGUGAAAAUAGCAGCCGAAAGGCUGC
SEQ ID NO: 1098 - PNPLA3 oligonucleotide 161 guide (antisense) strand
UAUUUUCACAAGUAGCCUCUGG
SEQ ID NO: 1099 - PNPLA3 oligonucleotide 162 passenger (sense) strand
GAGGCUACUUGUGAAAAUAAGCAGCCGAAAGGCUGC
SEQ ID NO: 1100 - PNPLA3 oligonucleotide 162 guide (antisense) strand
UUAUUUUCACAAGUAGCCUCGG
SEQ ID NO: 1101 - PNPLA3 oligonucleotide 163 passenger (sense) strand
AAAGUUACAAGUUUCUUUUAGCAGCCGAAAGGCUGC
SEQ ID NO: 1102 - PNPLA3 oligonucleotide 163 guide (antisense) strand
UAAAAGAAACUUGUAACUUUGG
SEQ ID NO: 1103 - PNPLA3 oligonucleotide 164 passenger (sense) strand
CAACAGUAUUUUCUAAUAAAGCAGCCGAAAGGCUGC
SEQ ID NO: 1104 - PNPLA3 oligonucleotide 164 guide (antisense) strand
UUUAUUAGAAAAUACUGUUGGG
SEQ ID NO: 1105 - PNPLA3 oligonucleotide 165 passenger (sense) strand
AACAGUAUUUUCUAAUAACAGCAGCCGAAAGGCUGC
SEQ ID NO: 1106 - PNPLA3 oligonucleotide 165 guide (antisense) strand
UGUUAUUAGAAAAUACUGUUGG
SEQ ID NO: 1107 - PNPLA3 oligonucleotide 166 passenger (sense) strand
ACAGUAUUUUCUAAUAACCAGCAGCCGAAAGGCUGC
SEQ ID NO: 1108 - PNPLA3 oligonucleotide 166 guide (antisense) strand
UGGUUAUUAGAAAAUACUGUGG
SEQ ID NO: 1109 - PNPLA3 oligonucleotide 167 passenger (sense) strand
CAGUAUUUUCUAAUAACCAAGCAGCCGAAAGGCUGC
SEQ ID NO: 1110 - PNPLA3 oligonucleotide 167 guide (antisense) strand
UUGGUUAUUAGAAAAUACUGGG
SEQ ID NO: 1111 - PNPLA3 oligonucleotide 168 passenger (sense) strand
UUGUGAUUGUUAUCAGGAAAGCAGCCGAAAGGCUGC
SEQ ID NO: 1112 - PNPLA3 oligonucleotide 168 guide (antisense) strand
UUUCCUGAUAACAAUCACAAGG
SEQ ID NO: 1113 - PNPLA3 oligonucleotide 169 passenger (sense) strand
UGUGAUUGUUAUCAGGAAAAGCAGCCGAAAGGCUGC
SEQ ID NO: 1114 - PNPLA3 oligonucleotide 169 guide (antisense) strand
UUUUCCUGAUAACAAUCACAGG
SEQ ID NO: 1115 - PNPLA3 oligonucleotide 170 passenger (sense) strand
GUGAUUGUUAUCAGGAAAAAGCAGCCGAAAGGCUGC
SEQ ID NO: 1116 - PNPLA3 oligonucleotide 170 guide (antisense) strand
UUUUUCCUGAUAACAAUCACGG
SEQ ID NO: 1117 - PNPLA3 oligonucleotide 171 passenger (sense) strand
UGAUUGUUAUCAGGAAAAAAGCAGCCGAAAGGCUGC
SEQ ID NO: 1118 - PNPLA3 oligonucleotide 171 guide (antisense) strand
UUUUUUCCUGAUAACAAUCAGG
SEQ ID NO: 1119 - PNPLA3 oligonucleotide 172 passenger (sense) strand
GAUUGUUAUCAGGAAAAAAAGCAGCCGAAAGGCUGC
SEQ ID NO: 1120 - PNPLA3 oligonucleotide 172 guide (antisense) strand
UUUUUUUCCUGAUAACAAUCGG
SEQ ID NO: 1121 - PNPLA3 oligonucleotide 173 passenger (sense) strand
AUUGUUAUCAGGAAAAAAUAGCAGCCGAAAGGCUGC
SEQ ID NO: 1122 - PNPLA3 oligonucleotide 173 guide (antisense) strand
UAUUUUUUCCUGAUAACAAUGG
SEQ ID NO: 1123 - PNPLA3 oligonucleotide 174 passenger (sense) strand
UUGUUAUCAGGAAAAAAUAAGCAGCCGAAAGGCUGC
SEQ ID NO: 1124 - PNPLA3 oligonucleotide 174 guide (antisense) strand
UUAUUUUUUCCUGAUAACAAGG
SEQ ID NO: 1125 - PNPLA3 oligonucleotide 175 passenger (sense) strand
UGUUAUCAGGAAAAAAUAUAGCAGCCGAAAGGCUGC
SEQ ID NO: 1126 - PNPLA3 oligonucleotide 175 guide (antisense) strand
UAUAUUUUUUCCUGAUAACAGG
SEQ ID NO: 1127 - PNPLA3 oligonucleotide 176 passenger (sense) strand
GUUAUCAGGAAAAAAUAUAAGCAGCCGAAAGGCUGC
SEQ ID NO: 1128 - PNPLA3 oligonucleotide 176 guide (antisense) strand
UUAUAUUUUUUCCUGAUAACGG
SEQ ID NO: 1129 - PNPLA3 oligonucleotide 177 passenger (sense) strand
UUAUCAGGAAAAAAUAUAUAGCAGCCGAAAGGCUGC
SEQ ID NO: 1130 - PNPLA3 oligonucleotide 177 guide (antisense) strand
UAUAUAUUUUUUCCUGAUAAGG
SEQ ID NO: 1131 - PNPLA3 oligonucleotide 178 passenger (sense) strand
AGGAAAAAAUAUAUUAAAUAGCAGCCGAAAGGCUGC
SEQ ID NO: 1132 - PNPLA3 oligonucleotide 178 guide (antisense) strand
UAUUUAAUAUAUUUUUUCCUGG
SEQ ID NO: 1133 - PNPLA3 oligonucleotide 179 passenger (sense) strand
GGAAAAAAUAUAUUAAAUGAGCAGCCGAAAGGCUGC
SEQ ID NO: 1134 - PNPLA3 oligonucleotide 179 guide (antisense) strand
UCAUUUAAUAUAUUUUUUCCGG
SEQ ID NO: 1135 - PNPLA3 oligonucleotide 180 passenger (sense) strand
GAAAAAAUAUAUUAAAUGGAGCAGCCGAAAGGCUGC
SEQ ID NO: 1136 - PNPLA3 oligonucleotide 180 guide (antisense) strand
UCCAUUUAAUAUAUUUUUUCGG
SEQ ID NO: 1137 - PNPLA3 oligonucleotide 181 passenger (sense) strand
AUUUUCUUUCUGCUUUUAAAGCAGCCGAAAGGCUGC
SEQ ID NO: 1138 - PNPLA3 oligonucleotide 181 guide (antisense) strand
UUUAAAAGCAGAAAGAAAAUGG
SEQ ID NO: 1139 - PNPLA3 oligonucleotide 182 passenger (sense) strand
UCUUUCUGCUUUUAAAAAUAGCAGCCGAAAGGCUGC
SEQ ID NO: 1140 - PNPLA3 oligonucleotide 182 guide (antisense) strand
UAUUUUUAAAAGCAGAAAGAGG
SEQ ID NO: 1141 - PNPLA3 oligonucleotide 183 passenger (sense) strand
UAAGGAAAUCAGGAAGUGUAGCAGCCGAAAGGCUGC
SEQ ID NO: 1142 - PNPLA3 oligonucleotide 183 guide (antisense) strand
UACACUUCCUGAUUUCCUUAGG
SEQ ID NO: 1143 - PNPLA3 oligonucleotide 184 passenger (sense) strand
AAGGAAAUCAGGAAGUGUAAGCAGCCGAAAGGCUGC
SEQ ID NO: 1144 - PNPLA3 oligonucleotide 184 guide (antisense) strand
UUACACUUCCUGAUUUCCUUGG
SEQ ID NO: 1145 - PNPLA3 oligonucleotide 185 passenger (sense) strand
GGAAAUCAGGAAGUGUAAUAGCAGCCGAAAGGCUGC
SEQ ID NO: 1146 - PNPLA3 oligonucleotide 185 guide (antisense) strand
UAUUACACUUCCUGAUUUCCGG
SEQ ID NO: 1147 - PNPLA3 oligonucleotide 186 passenger (sense) strand
CCACACCCAGCUAGUUUUUAGCAGCCGAAAGGCUGC
SEQ ID NO: 1148 - PNPLA3 oligonucleotide 186 guide (antisense) strand
UAAAAACUAGCUGGGUGUGGGG
SEQ ID NO: 1149 - PNPLA3 oligonucleotide 187 passenger (sense) strand
CACACCCAGCUAGUUUUUUAGCAGCCGAAAGGCUGC
SEQ ID NO: 1150 - PNPLA3 oligonucleotide 187 guide (antisense) strand
UAAAAAACUAGCUGGGUGUGGG
SEQ ID NO: 1151 - PNPLA3 oligonucleotide 188 passenger (sense) strand
CUAGGAUUACAGGUGUGAGAGCAGCCGAAAGGCUGC
SEQ ID NO: 1152 - PNPLA3 oligonucleotide 188 guide (antisense) strand
UCUCACACCUGUAAUCCUAGGG
SEQ ID NO: 1153 - PNPLA3 oligonucleotide 189 passenger (sense) strand
AGAGUAUGAGCCUGAUUUUAGCAGCCGAAAGGCUGC
SEQ ID NO: 1154 - PNPLA3 oligonucleotide 189 guide (antisense) strand
UAAAAUCAGGCUCAUACUCUGG
SEQ ID NO: 1155 - PNPLA3 oligonucleotide 190 passenger (sense) strand
GAGUAUGAGCCUGAUUUUGAGCAGCCGAAAGGCUGC
SEQ ID NO: 1156 - PNPLA3 oligonucleotide 190 guide (antisense) strand
UCAAAAUCAGGCUCAUACUCGG
SEQ ID NO: 1157 - PNPLA3 oligonucleotide 191 passenger (sense) strand
CCCAUCUCUACUAAAAAAUAGCAGCCGAAAGGCUGC
SEQ ID NO: 1158 - PNPLA3 oligonucleotide 191 guide (antisense) strand
UAUUUUUUAGUAGAGAUGGGGG
SEQ ID NO: 1159 - PNPLA3 oligonucleotide 192 passenger (sense) strand
ACUUUCAGCAUGAGAAAAUAGCAGCCGAAAGGCUGC
SEQ ID NO: 1160 - PNPLA3 oligonucleotide 192 guide (antisense) strand
UAUUUUCUCAUGCUGAAAGUGG
SEQ ID NO: 1161 - PNPLA3 oligonucleotide 193 passenger (sense) strand
CUGAGCUGAGUUGGUUUUAGCAGCCGAAAGGCUGC
SEQ ID NO: 1162 - PNPLA3 oligonucleotide 193 guide (antisense) strand
UUAAAACCAACUCAGCUCAGGG
SEQ ID NO: 1163 - PNPLA3 oligonucleotide 194 passenger (sense) strand
GCUGAGUUGGUUUUAUGAAAGCAGCCGAAAGGCUGC
SEQ ID NO: 1164 - PNPLA3 oligonucleotide 194 guide (sense) strand
UUUCAUAAAACCAACUCAGCGG
SEQ ID NO: 1165 - PNPLA3 control passenger (sense) strand
CUGUUGAAUUUUGUAUUAUA
SEQ ID NO: 1166 - PNPLA3 control guide (antisense) strand
UAUAAUACAAAAUUCAACAGGG
SEQ ID NO: 1167 - Target Sequence 1
CAACGTACCCTTCATTGAT
SEQ ID NO: 1168 - Target Sequence 2
TGAAAGACAAAGGTGGATA
SEQ ID NO: 1169 - Target Sequence 3
TACATGAGCAAGATTTGCA
SEQ ID NO: 1170 - Target Sequence 4
TGAGCAAGATTTGCAACTT
SEQ ID NO: 1171 - Target Sequence 5
CTCTGAGCTGAGTTGGTTT
SEQ ID NO: 1172 - Target Sequence 6
CTTTTTCACCTAACTAAAA
SEQ ID NO: 1173 - Target Sequence 7
TTCACCTAACTAAAATAAT
SEQ ID NO: 1174 - Target Sequence 8
CTAACTAAAATAATGTTTA
SEQ ID NO: 1175 - Target Sequence 9
CTGAGCTGAGTTGGTTTTA
SEQ ID NO: 1176 - Target Sequence 10
GCTGAGTTGGTTTTATGAA
SEQ ID NO: 1177 - Artificial Sequence
GCAGCCGAAAGGCUGC

TABLE A

| | SEQ ID | | |
|---|---|---|---|
| | NO. and | | |
| | Mod. | DP | |
| No. | Pattern | Number | Modified Oligonucleotide |
| 1 | 1170 | DP17736P: | [mCs][mC][fC][mA][mU][mU][mA][fG][fG][fA][mU][fA][fA][mU] |
| | SM1224/ | DP17735G | [mG][mU][fC][mU][mU][mA][mG][mC][mA][mG][mC][mC][mG] |
| | ASM1508 | | [ademA-GalNAc][ademA-GalNAc][ademA- |
| | | | GalNAc][mG][mG][mC][mU][mG][mC] (SEQ ID NO: 1178) |
| | | | [MePhosphonate-4O- |
| | | | mUs][fAs][fAs][mG][fA][mC][fA][fU][mU][fA][mU][fC][mC][fU] |
| | | | [mA][fA][mU][mG][fG][mGs][mGs][mG] (SEQ ID NO: 1179) |
| 2 | 0643 | DP17919P: | [mAs][mC][mA][mA][mC][mG][mU][fA][fC][fC][fC][mU][mU][mC] |
| | SM1405/ | DP17918G | [mA][mU][mU][mG][mA][mA][mG][mC][mA][mG][mC][mC][mG] |
| | ASM2028 | | [ademA-GalNAc][ademA-GalNAc][ademA- |
| | | | GalNAc][mG][mG][mC][mU][mG][mC] (SEQ ID NO: 1180) |
| | | | [MePhosphonate-4O- |
| | | | mUs][fUs][fCs][fA][fA][mU][fG][mA][mA][fG][mG][mG][mU][fA] |
| | | | [mC][mG][mU][mU][mG][mUs][mGs][mG] (SEQ ID NO: 1181) |
| 3 | 1110 | DP17921P: | [mGs][mC][mA][mC][mU][mG][mA][fG][fU][fG][fA][mA][mG] |
| | SM1405/ | DP17920G | [mA][mA][mA][mU][mG][mA][mA][mG][mC][mA][mG][mC][mC] |
| | ASM2028 | | [mG][ademA-GalNAc][ademA-GalNAc][ademA- |
| | | | GalNAc][mG][mG][mC][mU][mG][mC] (SEQ ID NO: 1182) |
| | | | [MePhosphonate-4O- |
| | | | mUs][fUs][fCs][fA][fU][mU][fU][mC][mU][fU][mC][mA][mC][fU] |
| | | | [mC][mA][mG][mU][mG][mCs][mGs][mG] (SEQ ID NO: 1183) |
| 4 | 1162 | DP17923P: | [mAs][mC][mU][mU][mG][mC][mU][fA][fC][fC][fC][mA][mU][mU] |
| | SM1405/ | DP17922G | [mA][mG][mG][mA][mU][mA][mG][mC][mA][mG][mC][mC][mG] |
| | ASM2028 | | [ademA-GalNAc][ademA-GalNAc][ademA- |
| | | | GalNAc][mG][mG][mC][mU][mG][mC] (SEQ ID NO: 1184) |
| | | | [MePhosphonate-4O- |
| | | | mUs][fAs][fUs][fC][fC][mU][fA][mA][mU][fG][mG][mG][mU][fA] |
| | | | [mG][mC][mA][mA][mG][mUs][mGs][mG] (SEQ ID NO: 1185) |
| 5 | 1170 | DP17925P: | [mCs][mC][mC][mA][mU][mU][mA][fG][fG][fA][fU][mA][mA] |
| | SM1405/ | DP17924G | [mU][mG][mU][mC][mU][mU][mA][mG][mC][mA][mG][mC][mC] |
| | ASM2028 | | [mG][ademA-GalNAc][ademA-GalNAc][ademA- |
| | | | GalNAc][mG][mG][mC][mU][mG][mC] (SEQ ID NO: 1186) |
| | | | [MePhosphonate-4O- |
| | | | mUs][fAs][fAs][fG][fA][mC][fA][mU][mU][fA][mU][mC][mC][fU] |
| | | | [mA][mA][mU][mG][mG][mGs][mGs][mG] (SEQ ID NO: 1187) |
| 6 | 1699 | DP17927P: | [mCs][mU][mG][mA][mG][mC][mU][fG][fA][fG][fU][mU][mG] |
| | SM1405/ | DP17926G | [mG][mU][mU][mU][mU][mA][mA][mG][mC][mA][mG][mC][mC] |
| | ASM2028 | | [mG][ademA-GalNAc][ademA-GalNAc][ademA- |
| | | | GalNAc][mG][mG][mC][mU][mG][mC] (SEQ ID NO: 1188) |
| | | | [MePhosphonate-4O- |
| | | | mUs][fUs][fAs][fA][fA][mA][fC][mC][mA][fA][mC][mU][mC][fA] |
| | | | [mG][mC][mU][mC][mA][mGs][mGs][mG] (SEQ ID NO: 1189) |
| 7 | 1703 | DP17929P: | [mGs][mC][mU][mG][mA][mG][mU][fU][fG][fG][fU][mU][mU] |
| | SM1405/ | DP17928G | [mU][mA][mU][mG][mA][mA][mA][mG][mC][mA][mG][mC][mC] |
| | ASM2028 | | [mG][ademA-GalNAc][ademA-GalNAc][ademA- |
| | | | GalNAc][mG][mG][mC][mU][mG][mC] (SEQ ID NO: 1190) |
| | | | [MePhosphonate-4O- |
| | | | mUs][fUs][fUs][fC][fA][mU][fA][mA][mA][fA][mC][mC][mA][fA] |
| | | | [mC][mU][mC][mA][mG][mCs][mGs][mG] (SEQ ID NO: 1191) |
| 8 | 1708 | DP17931P: | [mGs][mU][mU][mG][mG][mU][mU][fU][fU][fA][fU][mG][mA] |
| | SM1405/ | DP17930G | [mA][mA][mA][mG][mC][mU][mA][mG][mC][mA][mG][mC][mC] |
| | ASM2028 | | [mG][ademA-GalNAc][ademA-GalNAc][ademA- |
| | | | GalNAc][mG][mG][mC][mU][mG][mC] (SEQ ID NO: 1192) |
| | | | [MePhosphonate-4O- |
| | | | mUs][fAs][fGs][fC][fU][mU][fU][mU][mC][fA][mU][mA][mA][fA] |
| | | | [mA][mC][mC][mA][mA][mCs][mGs][mG] (SEQ ID NO: 1193) |
| 9 | 2104 | DP17933P: | [mGs][mG][mU][mA][mA][mC][mA][fA][fG][fA][fU][mG][mA] |
| | SM1405/ | DP17932G | [mU][mA][mA][mU][mC][mU][mA][mG][mC][mA][mG][mC][mC] |
| | ASM2028 | | [mG][ademA-GalNAc][ademA-GalNAc][ademA- |
| | | | GalNAc][mG][mG][mC][mU][mG][mC] (SEQ ID NO: 1194) |
| | | | [MePhosphonate-4O- |
| | | | mUs][fAs][fGs][fA][fU][mU][fA][mU][mC][fA][mU][mC][mU][fU] |
| | | | [mG][mU][mU][mA][mC][mCs][mGs][mG] (SEQ ID NO: 1195) |
| 10 | 2143 | DP17935P: | [mUs][mU][mU][mC][mA][mC][mC][fU][fA][fA][fC][mU][mA][mA] |
| | SM1405/ | DP17934G | [mA][mA][mU][mA][mA][mA][mG][mC][mA][mG][mC][mC][mG] |
| | ASM2028 | | [ademA-GalNAc][ademA-GalNAc][ademA- |
| | | | GalNAc][mG][mG][mC][mU][mG][mC] (SEQ ID NO: 1196) |
| | | | [MePhosphonate-4O- |
| | | | mUs][fUs][fUs][fA][fU][mU][fU][mU][mA][fG][mU][mU][mA][fG] |
| | | | [mG][mU][mG][mA][mA][mAs][mGs][mG] (SEQ ID NO: 1197) |
| 11 | 2155 | DP17937P: | [mAs][mA][mA][mA][mU][mA][mA][fU][fG][fU][fU][mU][mA] |
| | SM1405/ | DP17936G | [mA][mA][mG][mA][mG][mU][mA][mG][mC][mA][mG][mC][mC] |
| | ASM2028 | | [mG][ademA-GalNAc][ademA-GalNAc][ademA- |
| | | | GalNAc][mG][mG][mC][mU][mG][mC] (SEQ ID NO: 1198) |
| | | | [MePhosphonate-4O- |
| | | | mUs][fAs][fCs][fU][fC][mU][fU][mU][mA][fA][mA][mC][mA][fU] |
| | | | [mU][mA][mU][mU][mU][mUs][mGs][mG] (SEQ ID NO: 1199) |
| 12 | 2156 | DP17939P: | [mAs][mA][mA][mU][mA][mA][mU][fG][fU][fU][fU][mA][mA] |
| | SM1405/ | DP17938G | [mA][mG][mA][mG][mU][mU][mA][mG][mC][mA][mG][mC][mC] |
| | ASM2028 | | [mG][ademA-GalNAc][ademA-GalNAc][ademA- |
| | | | GalNAc][mG][mG][mC][mU][mG][mC] (SEQ ID NO: 1200) |
| | | | [MePhosphonate-4O- |
| | | | mUs][fAs][fAs][fC][fU][mC][fU][mU][mU][fA][mA][mA][mC][fA] |
| | | | [mU][mU][mA][mU][mU][mUs][mGs][mG] (SEQ ID NO: 1201) |
| 13 | 2157 | DP17941P: | [mAs][mA][mU][mA][mA][mU][mG][fU][fU][fU][fA][mA][mA] |
| | SM1405/ | DP17940G | [mG][mA][mG][mU][mU][mU][mA][mG][mC][mA][mG][mC][mC] |
| | ASM2028 | | [mG][ademA-GalNAc][ademA-GalNAc][ademA- |
| | | | GalNAc][mG][mG][mC][mU][mG][mC] (SEQ ID NO: 1202) |
| | | | [MePhosphonate-4O- |
| | | | mUs][fAs][fAs][fA][fC][mU][fC][mU][mU][fU][mA][mA][mA][fC] |
| | | | [mA][mU][mU][mA][mU][mUs][mGs][mG] (SEQ ID NO: 1203) |
| 14 | 2163 | DP17943P: | [mGs][mU][mU][mU][mA][mA][mA][fG][fA][fG][fU][mU][mU] |
| | SM1405/ | DP17942G | [mU][mG][mU][mA][mU][mA][mA][mG][mC][mA][mG][mC][mC] |
| | ASM2028 | | [mG][ademA-GalNAc][ademA-GalNAc][ademA- |
| | | | GalNAc][mG][mG][mC][mU][mG][mC] (SEQ ID NO: 1204) |
| | | | [MePhosphonate-4O- |
| | | | mUs][fUs][fAs][fU][fA][mC][fA][mA][mA][fA][mC][mU][mC][fU] |
| | | | [mU][mU][mA][mA][mA][mCs][mGs][mG] (SEQ ID NO: 1205) |
| 15 | 2165 | DP17945P: | [mUs][mU][mA][mA][mA][mG][mA][fG][fU][fU][fU][mU][mG] |
| | SM1405/ | DP17944G | [mU][mA][mU][mA][mA][mA][mA][mG][mC][mA][mG][mC][mC] |
| | ASM2028 | | [mG][ademA-GalNAc][ademA-GalNAc][ademA- |
| | | | GalNAc][mG][mG][mC][mU][mG][mC] (SEQ ID NO: 1206) |
| | | | [MePhosphonate-4O- |
| | | | mUs][fUs][fUs][fU][fA][mU][fA][mC][mA][fA][mA][mA][mC][fU] |
| | | | [mC][mU][mU][mU][mA][mAs][mGs][mG] (SEQ ID NO: 1207) |
| 16 | 2170 | DP17947P: | [mGs][mA][mG][mU][mU][mU][mU][fG][fU][fA][fU][mA][mA] |
| | SM1405/ | DP17946G | [mA][mA][mA][mU][mG][mU][mA][mG][mC][mA][mG][mC][mC] |
| | ASM2028 | | [mG][ademA-GalNAc][ademA-GalNAc][ademA- |
| | | | GalNAc][mG][mG][mC][mU][mG][mC] (SEQ ID NO: 1208) |
| | | | [MePhosphonate-4O- |
| | | | mUs][fAs][fCs][fA][fU][mU][fU][mU][mU][fA][mU][mA][mC][fA] |
| | | | [mA][mA][mA][mC][mU][mCs][mGs][mG] (SEQ ID NO: 1209) |
| 17 | 2195 | DP17949P: | [mGs][mC][mG][mU][mU][mG][mU][fU][fA][fC][fC][mU][mG] |
| | SM1405/ | DP17948G | [mU][mU][mG][mA][mA][mU][mA][mG][mC][mA][mG][mC][mC] |
| | ASM2028 | | [mG][ademA-GalNAc][ademA-GalNAc][ademA- |
| | | | GalNAc][mG][mG][mC][mU][mG][mC] (SEQ ID NO: 1210) |
| | | | [MePhosphonate-4O- |
| | | | mUs][fAs][fUs][fU][fC][mA][fA][mC][mA][fG][mG][mU][mA][fA] |
| | | | [mC][mA][mA][mC][mG][mCs][mGs][mG] (SEQ ID NO: 1211) |
| 18 | 2200 | DP17951P: | [mGs][mU][mU][mA][mC][mC][mU][fG][fU][fU][fG][mA][mA] |
| | SM1405/ | DP17950G | U[m][mU][mU][mU][mG][mU][mA][mG][mC][mA][mG][mC][mC] |
| | ASM2028 | | [mG][ademA-GalNAc][ademA-GalNAc][ademA- |
| | | | GalNAc][mG][mG][mC][mU][mG][mC] (SEQ ID NO: 1212) |
| | | | [MePhosphonate-4O- |
| | | | mUs][fAs][fCs][fA][fA][mA][fA][mU][mU][fC][mA][mA][mC][fA] |
| | | | [mG][mG][mU][mA][mA][mCs][mGs][mG] (SEQ ID NO: 1213) |
| 19 | 2204 | DP17953P: | [mCs][mC][mU][mG][mU][mU][mG][fA][fA][fU][fU][mU][mU] |
| | SM1405/ | DP17952G | [mG][mU][mA][mU][mU][mA][mA][mG][mC][mA][mG][mC][mC] |
| | ASM2028 | | [mG][ademA-GalNAc][ademA-GalNAc][ademA- |
| | | | GalNAc][mG][mG][mC][mU][mG][mC] (SEQ ID NO: 1214) |
| | | | [MePhosphonate-4O- |
| | | | mUs][fUs][fAs][fA][fU][mA][fC][mA][mA][fA][mA][mU][mU][fC] |
| | | | [mA][mA][mC][mA][mG][mGs][mGs][mG] (SEQ ID NO: 1215) |
| 20 | 2205 | DP17955P: | [mCs][mU][mG][mU][mU][mG][mA][fA][fU][fU][fU][mU][mG] |
| | SM1405/ | DP17954G | [mU][mA][mU][mU][mA][mU][mA][mG][mC][mA][mG][mC][mC] |
| | ASM2028 | | [mG][ademA-GalNAc][ademA-GalNAc][ademA- |
| | | | GalNAc][mG][mG][mC][mU][mG][mC] (SEQ ID NO: 1216) |
| | | | [MePhosphonate-4O- |
| | | | mUs][fAs][fUs][fA][fA][mU][fA][mC][mA][fA][mA][mA][mU][fU] |
| | | | [mC][mA][mA][mC][mA][mGs][mGs][mG] (SEQ ID NO: 1217) |
| 21 | 2210 | DP17957P: | [mGs][mA][mA][mU][mU][mU][mU][fG][fU][fA][fU][mU][mA] |
| | SM1405/ | DP17956G | [mU][mG][mU][mG][mA][mA][mA][mG][mC][mA][mG][mC][mC] |
| | ASM2028 | | [mG][ademA-GalNAc][ademA-GalNAc][ademA- |
| | | | GalNAc][mG][mG][mC][mU][mG][mC] (SEQ ID NO: 1218) |
| | | | [MePhosphonate-4O- |
| | | | mUs][fUs][fUs][fC][fA][mC][fA][mU][mA][fA][mU][mA][mC][fA] |
| | | | [mA][mA][mA][mU][mU][mCs][mGs][mG] (SEQ ID NO: 1219) |

TABLE B

| SEQ ID | | |
|---|---|---|
| NO. and | | |
| Mod. | | |
| Pattern | DP Number | Modified Oligonucleotide |
| 0644 | DP18056P: | [mCs][mA][mA][mC][mG][mU][mA][fC][fC][fC][fU][mU][mC][mA] |
| SM1405/ | DP18055G | [mU][mU][mG][mA][mU][mA][mG][mC][mA][mG][mC][mC][mG] |
| ASM2028 | | [ademA-GalNAc][ademA-GalNAc][ademA- |
| | | GalNAc][mG][mG][mC][mU][mG][mC] (SEQ ID NO: 1220) |
| | | [MePhosphonate-4O- |
| | | mUs][fAs][fUs][fC][fA][mA][fU][mG][mA][fA][mG][mG][mG][fU] |
| | | [mA][mC][mG][mU][mU][mGs][mGs][mG] (SEQ ID NO: 1221) |
| 0745 | DP18084P: | [mUs][mG][mG][mA][mC][mA][mU][fC][fA][fC][fC][mA][mA][mG] |
| SM1405/ | DP18083G | [mC][mU][mC][mA][mG][mA][mG][mC][mA][mG][mC][mC][mG] |
| ASM2028 | | [ademA-GalNAc][ademA-GalNAc][ademA- |
| | | GalNAc][mG][mG][mC][mU][mG][mC] (SEQ ID NO: 1222) |
| | | [MePhosphonate-4O- |
| | | mUs][fCs][fUs][fG][fA][mG][fC][mU][mU][fG][mG][mU][mG][fA] |
| | | [mU][mG][mU][mC][mC][mAs][mGs][mG] (SEQ ID NO: 1223) |
| 1126 | DP18112P: | [mUs][mG][mA][mA][mA][mG][mA][fC][fA][fA][fA][mG][mG][mU] |
| SM1405/ | 8DP1111G | [mG][mG][mA][mU][mA][mA][mG][mC][mA][mG][mC][mC][mG] |
| ASM2028 | | [ademA-GalNAc][ademA-GalNAc][ademA- |
| | | GalNAc][mG][mG][mC][mU][mG][mC] (SEQ ID NO: 1224) |
| | | [MePhosphonate-4O- |
| | | mUs][fUs][fAs][fU][fC][mC][fA][mC][mC][fU][mU][mU][mG][fU] |
| | | [mC][mU][mU][mU][mC][mAs][mGs][mG] (SEQ ID NO: 1225) |
| 1129 | DP18116P: | [mAs][mA][mG][mA][mC][mA][mA][fA][fG][fG][fU][mG][mG][mA] |
| SM1405/ | DP18115G | [mU][mA][mC][mA][mU][mA][mG][mC][mA][mG][mC][mC][mG] |
| ASM2028 | | [ademA-GalNAc][ademA-GalNAc][ademA- |
| | | GalNAc][mG][mG][mC][mU][mG][mC] (SEQ ID NO: 1226) |
| | | [MePhosphonate-4O- |
| | | mUs][fAs][fUs][fG][fU][mA][fU][mC][mC][fA][mC][mC][mU][fU] |
| | | [mU][mG][mU][mC][mU][mUs][mGs][mG] (SEQ ID NO: 1227) |
| 1130 | DP18118P: | [mAs][mG][mA][mC][mA][mA][mA][fG][fG][fU][fG][mG][mA][mU] |
| SM1405/ | DP18117G | [mA][mC][mA][mU][mG][mA][mG][mC][mA][mG][mC][mC][mG] |
| ASM2028 | | [ademA-GalNAc][ademA-GalNAc][ademA- |
| | | GalNAc][mG][mG][mC][mU][mG][mC] (SEQ ID NO: 1228) |
| | | [MePhosphonate-4O- |
| | | mUs][fCs][fAs][fU][fG][mU][fA][mU][mC][fC][mA][mC][mC][fU] |
| | | [mU][mU][mG][mU][mC][mUs][mGs][mG] (SEQ ID NO: 1229) |
| 1143 | DP18136P: | [mUs][mA][mC][mA][mU][mG][mA][fG][fC][fA][fA][mG][mA][mU] |
| SM1405/ | DP18135G | [mU][mU][mG][mC][mA][mA][mG][mC][mA][mG][mC][mC][mG] |
| ASM2028 | | [ademA-GalNAc][ademA-GalNAc][ademA- |
| | | GalNAc][mG][mG][mC][mU][mG][mC] (SEQ ID NO: 1230) |
| | | [MePhosphonate-4O- |
| | | mUs][fUs][fGs][fC][fA][mA][fA][mU][mC][fU][mU][mG][mC][fU] |
| | | [mC][mA][mU][mG][mU][mAs][mGs][mG] (SEQ ID NO: 1231) |
| 1147 | DP18140P: | [mUs][mG][mA][mG][mC][mA][mA][fG][fA][fU][fU][mU][mG][mC] |
| SM1405/ | DP18139G | [mA][mA][mC][mU][mU][mA][mG][mC][mA][mG][mC][mC][mG] |
| ASM2028 | | [ademA-GalNAc][ademA-GalNAc][ademA- |
| | | GalNAc][mG][mG][mC][mU][mG][mC] (SEQ ID NO: 1232) |
| | | [MePhosphonate-4O- |
| | | mUs][fAs][fAs][fG][fU][mU][fG][mC][mA][fA][mA][mU][mC][fU] |
| | | [mU][mG][mC][mU][mC][mAs][mGs][mG] (SEQ ID NO: 1233) |
| 1152 | DP18150P: | [mAs][mA][mG][mA][mU][mU][mU][fG][fC][fA][fA][mC][mU][mU] |
| SM1405/ | DP18149G | [mG][mC][mU][mA][mC][mA][mG][mC][mA][mG][mC][mC][mG] |
| ASM2028 | | [ademA-GalNAc][ademA-GalNAc][ademA- |
| | | GalNAc][mG][mG][mC][mU][mG][mC] (SEQ ID NO: 1234) |
| | | [MePhosphonate-4O- |
| | | mUs][fGs][fUs][fA][fG][mC][fA][mA][mG][fU][mU][mG][mC][fA] |
| | | [mA][mA][mU][mC][mU][mUs][mGs][mG] (SEQ ID NO: 1235) |
| 1229 | DP18172P: | [mUs][mG][mC][mG][mA][mU][mU][fG][fU][fC][fC][mA][mG][mA] |
| SM1405/ | DP18171G | [mG][mA][mC][mU][mG][mA][mG][mC][mA][mG][mC][mC][mG] |
| ASM2028 | | [ademA-GalNAc][ademA-GalNAc][ademA- |
| | | GalNAc][mG][mG][mC][mU][mG][mC] (SEQ ID NO: 1236) |
| | | [MePhosphonate-4O- |
| | | mUs][fCs][fAs][fG][fU][mC][fU][mC][mU][fG][mG][mA][mC][fA] |
| | | [mA][mU][mC][mG][mC][mAs][mGs][mG] (SEQ ID NO: 1237) |
| 2142 | DP18274P: | [mUs][mU][mU][mU][mC][mA][mC][fC][fU][fA][fA][mC][mU][mA] |
| SM1405/ | DP18273G | [mA][mA][mA][mU][mA][mA][mG][mC][mA][mG][mC][mC][mG] |
| ASM2028 | | [ademA-GalNAc][ademA-GalNAc][ademA- |
| | | GalNAc][mG][mG][mC][mU][mG][mC] (SEQ ID NO: 1238) |
| | | [MePhosphonate-4O- |
| | | mUs][fUs][fAs][fU][fU][mU][fU][mA][mG][fU][mU][mA][mG][fG] |
| | | [mU][mG][mA][mA][mA][mAs][mGs][mG] (SEQ ID NO: 1239) |
| 1698 | DP18208P: | [mUs][mC][mU][mG][mA][mG][mC][fU][fG][fA][fG][mU][mU][mG] |
| SM1405/ | DP18207G | [mG][mU][mU][mU][mU][mA][mG][mC][mA][mG][mC][mC][mG] |
| ASM2028 | | [ademA-GalNAc][ademA-GalNAc][ademA- |
| | | GalNAc][mG][mG][mC][mU][mG][mC] (SEQ ID NO: 1240) |
| | | [MePhosphonate-4O- |
| | | mUs][fAs][fAs][fA][fA][mC][fC][mA][mA][fC][mU][mC][mA][fG] |
| | | [mC][mU][mC][mA][mG][mAs][mGs][mG] (SEQ ID NO: 1241) |
| 2138 | DP18270P: | [mAs][mC][mC][mU][mU][mU][mU][fU][fC][fA][fC][mC][mU][mA] |
| SM1405/ | 8DP1269G | [mA][mC][mU][mA][mA][mA][mG][mC][mA][mG][mC][mC][mG] |
| ASM2028 | | [ademA-GalNAc][ademA-GalNAc][ademA- |
| | | GalNAc][mG][mG][mC][mU][mG][mC] (SEQ ID NO: 1242) |
| | | [MePhosphonate-4O- |
| | | mUs][fUs][fUs][fA][fG][mU][fU][mA][mG][fG][mU][mG][mA][fA] |
| | | [mA][mA][mA][mG][mG][mUs][mGs][mG] (SEQ ID NO: 1243) |
| 2140 | DP18272P: | [mCs][mU][mU][mU][mU][mU][mC][fA][fC][fC][fU][mA][mA][mC] |
| SM1405/ | DP18271G | [mU][mA][mA][mA][mA][mA][mG][mC][mA][mG][mC][mC][mG] |
| ASM2028 | | [ademA-GalNAc][ademA-GalNAc][ademA- |
| | | GalNAc][mG][mG][mC][mU][mG][mC] (SEQ ID NO: 1244) |
| | | [MePhosphonate-4O- |
| | | mUs][fUs][fUs][fU][fU][mA][fG][mU][mU][fA][mG][mG][mU][fG] |
| | | [mA][mA][mA][mA][mA][mGs][mGs][mG] (SEQ ID NO: 1245) |
| 2144 | DP18276P: | [mUs][mU][mC][mA][mC][mC][mU][fA][fA][fC][fU][mA][mA][mA] |
| SM1405/ | DP18275G | [mA][mU][mA][mA][mU][mA][mG][mC][mA][mG][mC][mC][mG] |
| ASM2028 | | [ademA-GalNAc][ademA-GalNAc][ademA- |
| | | GalNAc][mG][mG][mC][mU][mG][mC] (SEQ ID NO: 1246) |
| | | [MePhosphonate-4O- |
| | | mUs][fAs][fUs][fU][fA][mU][fU][mU][mU][fA][mG][mU][mU][fA] |
| | | [mG][mG][mU][mG][mA][mAs][mGs][mG] (SEQ ID NO: 1247) |
| 2146 | DP18280P: | [mCs][mA][mC][mC][mU][mA][mA][fC][fU][fA][fA][mA][mA][mU] |
| SM1405/ | DP18279G | [mA][mA][mU][mG][mU][mA][mG][mC][mA][mG][mC][mC][mG] |
| ASM2028 | | [ademA-GalNAc][ademA-GalNAc][ademA- |
| | | GalNAc][mG][mG][mC][mU][mG][mC] (SEQ ID NO: 1248) |
| | | [MePhosphonate-4O- |
| | | mUs][fAs][fCs][fA][fU][mU][fA][mU][mU][fU][mU][mA][mG][fU] |
| | | [mU][mA][mG][mG][mU][mGs][mGs][mG] (SEQ ID NO: 1249) |
| 2149 | DP18286P: | [mCs][mU][mA][mA][mC][mU][mA][fA][fA][fA][fU][mA][mA][mU] |
| SM1405/ | DP18285G | [mG][mU][mU][mU][mA][mA][mG][mC][mA][mG][mC][mC][mG] |
| ASM2028 | | [ademA-GalNAc][ademA-GalNAc][ademA- |
| | | GalNAc][mG][mG][mC][mU][mG][mC] (SEQ ID NO: 1250) |
| | | [MePhosphonate-4O- |
| | | mUs][fUs][fAs][fA][fA][mC][fA][mU][mU][fA][mU][mU][mU][fU] |
| | | [mA][mG][mU][mU][mA][mGs][mGs][mG] (SEQ ID NO: 1251) |
| 2137 | DP18268P: | [mCs][mA][mC][mC][mU][mU][mU][fU][fU][fC][fA][mC][mC][mU] |
| SM1405/ | 8DP1267G | [mA][mA][mC][mU][mA][mA][mG][mC][mA][mG][mC][mC][mG] |
| ASM2028 | | [ademA-GalNAc][ademA-GalNAc][ademA- |
| | | GalNAc][mG][mG][mC][mU][mG][mC] (SEQ ID NO: 1252) |
| | | [MePhosphonate-4O- |
| | | mUs][fUs][fAs][fG][fU][mU][fA][mG][mG][fU][mG][mA][mA][fA] |
| | | [mA][mA][mG][mG][mU][mGs][mGs][mG] (SEQ ID NO: 1253) |
| 2205 | DP17955P: | [mCs][mU][mG][mU][mU][mG][mA][fA][fU][fU][fU][mU][mG][mU] |
| SM1405/ | DP17954G | [mA][mU][mU][mA][mU][mA][mG][mC][mA][mG][mC][mC][mG] |
| ASM2028 | | [ademA-GalNAc][ademA-GalNAc][ademA- |
| | | GalNAc][mG][mG][mC][mU][mG][mC] (SEQ ID NO: 1216) |
| | | [MePhosphonate-4O- |
| | | mUs][fAs][fUs][fA][fA][mU][fA][mC][mA][fA][mA][mA][mU][fU] |
| | | [mC][mA][mA][mC][mA][mGs][mGs][mG] (SEQ ID NO: 1217) |

TABLE C

| SEQ ID NO. | | |
|---|---|---|
| and Mod. | DP | |
| Pattern | Number | Modified Oligonucleotide |
| 1697 | DP18206P: | [mCs][mU][mC][mU][mG][mA][mG][fC][fU][fG][fA][mG] |
| SM1405/ | DP18205G | [mU][mU][mG][mG][mU][mU][mU][mA][mG][mC][mA][mG] |
| ASM2028 | | [mC][mC][mG][ademA-GalNAc][ademA-GalNAc][ademA- |
| | | GalNAc][mG][mG][mC][mU][mG][mC] (SEQ ID NO: 1254) |
| | | [MePhosphonate-4O- |
| | | mUs][fAs][fAs][fA][fC][mC][fA][mA][mC][fU][mC][mA][mG] |
| | | [fC][mU][mC][mA][mG][mA][mGs][mGs][mG] (SEQ ID NO: |
| | | 1255) |
| 1614 | DP18194P: | [mAs][mG][mG][mU][mG][mC][mU][fA][fA][fA][fG][mU] |
| SM1405/ | DP18193G | [mU][mU][mC][mC][mC][mA][mU][mA][mG][mC][mA][mG] |
| ASM2028 | | [mC][mC][mG][ademA-GalNAc][ademA-GalNAc][ademA- |
| | | GalNAc][mG][mG][mC][mU][mG][mC] (SEQ ID NO: 1256) |
| | | [MePhosphonate-4O- |
| | | mUs][fAs][fUs][fG][fG][mG][fA][mA][mA][fC][mU][mU][mU] |
| | | [fA][mG][mC][mA][mC][mC][mUs][mGs][mG] (SEQ ID NO: |
| | | 1257) |
| 2176 | DP18304P: | [mUs][mG][mU][mA][mU][mA][mA][fA][fA][fA][fU][mG] |
| SM1405/ | DP18303G | [mU][mA][mA][mG][mG][mA][mA][mA][mG][mC][mA][mG] |
| ASM2028 | | [mC][mC][mG][ademA-GalNAc][ademA-GalNAc][ademA- |
| | | GalNAc][mG][mG][mC][mU][mG][mC] (SEQ ID NO: 1258) |
| | | [MePhosphonate-4O- |
| | | mUs][fUs][fUs][fC][fC][mU][fU][mA][mC][fA][mU][mU][mU] |
| | | [fU][mU][mA][mU][mA][mC][mAs][mGs][mG] (SEQ ID NO: |
| | | 1259) |
| 2222 | DP18326P: | [mAs][mU][mG][mU][mG][mA][mA][fU][fC][fA][fG][mU] |
| SM1405/ | DP18325G | [mG][mA][mG][mA][mU][mG][mU][mA][mG][mC][mA][mG] |
| ASM2028 | | [mC][mC][mG][ademA-GalNAc][ademA-GalNAc][ademA- |
| | | GalNAc][mG][mG][mC][mU][mG][mC] (SEQ ID NO: 1260) |
| | | [MePhosphonate-4O- |
| | | mUs][fAs][fCs][fA][fU][mC][fU][mC][mA][fC][mU][mG][mA] |
| | | [fU][mU][mC][mA][mC][mA][mUs][mGs][mG] (SEQ ID NO: |
| | | 1261) |
| 1173 | DP18168P: | [mAs][mU][mU][mA][mG][mG][mA][fU][fA][fA][fU][mG] |
| SM1405/ | DP18167G | [mU][mC][mU][mU][mA][mU][mG][mA][mG][mC][mA][mG] |
| ASM2028 | | [mC][mC][mG][ademA-GalNAc][ademA-GalNAc][ademA- |
| | | GalNAc][mG][mG][mC][mU][mG][mC] (SEQ ID NO: 1262) |
| | | [MePhosphonate-4O- |
| | | mUs][fCs][fAs][fU][fA][mA][fG][mA][mC][fA][mU][mU][mA] |
| | | [fU][mC][mC][mU][mA][mA][mUs][mGs][mG] (SEQ ID NO: |
| | | 1263) |
| 2136 | DP18266P: | [mAs][mC][mA][mC][mC][mU][mU][fU][fU][fU][fC][mA] |
| SM1405/ | DP18265G | [mC][mC][mU][mA][mA][mC][mU][mA][mG][mC][mA][mG] |
| ASM2028 | | [mC][mC][mG][ademA-GalNAc][ademA-GalNAc][ademA- |
| | | GalNAc][mG][mG][mC][mU][mG][mC] (SEQ ID NO: 1264) |
| | | [MePhosphonate-4O- |
| | | mUs][fAs][fGs][fU][fU][mA][fG][mG][mU][fG][mA][mA][mA] |
| | | [fA][mA][mG][mG][mU][mG][mUs][mGs][mG] (SEQ ID NO: |
| | | 1265) |
| 0637 | DP18046P: | [mUs][mG][mA][mG][mU][mG][mA][fC][fA][fA][fC][mG] |
| SM1405/ | DP18045G | [mU][mA][mC][mC][mC][mU][mU][mA][mG][mC][mA][mG] |
| ASM2028 | | [mC][mC][mG][ademA-GalNAc][ademA-GalNAc][ademA- |
| | | GalNAc][mG][mG][mC][mU][mG][mC] (SEQ ID NO: 1266) |
| | | [MePhosphonate-4O- |
| | | mUs][fAs][fAs][fG][fG][mG][fU][mA][mC][fG][mU][mU][mG] |
| | | [fU][mC][mA][mC][mU][mC][mAs][mGs][mG] (SEQ ID NO: |
| | | 1267) |
| 1116 | DP18098P: | [mAs][mG][mU][mG][mA][mA][mG][fA][fA][fA][fU][mG] |
| SM1405/ | DP18097G | [mA][mA][mA][mG][mA][mC][mA][mA][mG][mC][mA][mG] |
| ASM2028 | | [mC][mC][mG][ademA-GalNAc][ademA-GalNAc][ademA- |
| | | GalNAc][mG][mG][mC][mU][mG][mC] (SEQ ID NO: 1268) |
| | | [MePhosphonate-4O- |
| | | mUs][fUs][fGs][fU][fC][mU][fU][mU][mC][fA][mU][mU][mU] |
| | | [fC][mU][mU][mC][mA][mC][mUs][mGs][mG] (SEQ ID NO: |
| | | 1269) |
| 0923 | DP18096P: | [mAs][mU][mC][mC][mU][mC][mA][fG][fA][fA][fG][mG] |
| SM1405/ | DP18095G | [mG][mA][mU][mG][mG][mA][mU][mA][mG][mC][mA][mG] |
| ASM2028 | | [mC][mC][mG][ademA-GalNAc][ademA-GalNAc][ademA- |
| | | GalNAc][mG][mG][mC][mU][mG][mC] (SEQ ID NO: 1270) |
| | | [MePhosphonate-4O- |
| | | mUs][fAs][fUs][fC][fC][mA][fU][mC][mC][fC][mU][mU][mC] |
| | | [fU][mG][mA][mG][mG][mA][mUs][mGs][mG] (SEQ ID NO: |
| | | 1271) |
| 0641 | DP18052P: | [mUs][mG][mA][mC][mA][mA][mC][fG][fU][fA][fC][mC] |
| SM1405/ | DP18051G | [mC][mU][mU][mC][mA][mU][mU][mA][mG][mC][mA][mG] |
| ASM2028 | | [mC][mC][mG][ademA-GalNAc][ademA-GalNAc][ademA- |
| | | GalNAc][mG][mG][mC][mU][mG][mC] (SEQ ID NO: 1272) |
| | | [MePhosphonate-4O- |
| | | mUs][fAs][fAs][fU][fG][mA][fA][mG][mG][fG][mU][mA][mC] |
| | | [fG][mU][mU][mG][mU][mC][mAs][mGs][mG] (SEQ ID NO: |
| | | 1273) |
| 1136 | DP18126P: | [mAs][mG][mG][mU][mG][mG][mA][fU][fA][fC][fA][mU] |
| SM1405/ | DP18125G | [mG][mA][mG][mC][mA][mA][mG][mA][mG][mC][mA][mG] |
| ASM2028 | | [mC][mC][mG][ademA-GalNAc][ademA-GalNAc][ademA- |
| | | GalNAc][mG][mG][mC][mU][mG][mC] (SEQ ID NO: 1274) |
| | | [MePhosphonate-4O- |
| | | mUs][fCs][fUs][fU][fG][mC][fU][mC][mA][fU][mG][mU][mA] |
| | | [fU][mC][mC][mA][mC][mC][mUs][mGs][mG] (SEQ ID NO: |
| | | 1275) |
| 1158 | DP18158P: | [mUs][mG][mC][mA][mA][mC][mU][fU][fG][fC][fU][mA] |
| SM1405/ | DP18157G | [mC][mC][mC][mA][mU][mU][mA][mA][mG][mC][mA][mG] |
| ASM2028 | | [mC][mC][mG][ademA-GalNAc][ademA-GalNAc][ademA- |
| | | GalNAc][mG][mG][mC][mU][mG][mC] (SEQ ID NO: 1276) |
| | | [MePhosphonate-4O- |
| | | mUs][fUs][fAs][fA][fU][mG][fG][mG][mU][fA][mG][mC][mA] |
| | | [fA][mG][mU][mU][mG][mC][mAs][mGs][mG] (SEQ ID NO: |
| | | 1277) |
| 1151 | DP18148P: | [mCs][mA][mA][mG][mA][mU][mU][fU][fG][fC][fA][mA] |
| SM1405/ | DP18147G | [mC][mU][mU][mG][mC][mU][mA][mA][mG][mC][mA][mG] |
| ASM2028 | | [mC][mC][mG][ademA-GalNAc][ademA-GalNAc][ademA- |
| | | GalNAc][mG][mG][mC][mU][mG][mC] (SEQ ID NO: 1278) |
| | | [MePhosphonate-4O- |
| | | mUs][fUs][fAs][fG][fC][mA][fA][mG][mU][fU][mG][mC][mA] |
| | | [fA][mA][mU][mC][mU][mU][mGs][mGs][mG] (SEQ ID NO: |
| | | 1279) |
| 1541 | DP18184P: | [mCs][mA][mC][mC][mU][mU][mU][fC][fC][fC][fA][mG][mU] |
| SM1405/ | DP18183G | [mU][mU][mU][mU][mC][mA][mA][mG][mC][mA][mG][mC] |
| ASM2028 | | [mC][mG][ademA-GalNAc][ademA-GalNAc][ademA- |
| | | GalNAc][mG][mG][mC][mU][mG][mC] (SEQ ID NO: 1280) |
| | | [MePhosphonate-4O- |
| | | mUs][fUs][fGs][fA][fA][mA][fA][mA][mC][fU][mG][mG][mG] |
| | | [fA][mA][mA][mG][mG][mU][mGs][mGs][mG] (SEQ ID NO: |
| | | 1281) |
| 1157 | DP18156P: | [mUs][mU][mG][mC][mA][mA][mC][fU][fU][fG][fC][mU] |
| SM1405/ | DP18155G | [mA][mC][mC][mC][mA][mU][mU][mA][mG][mC][mA][mG] |
| ASM2028 | | [mC][mC][mG][ademA-GalNAc][ademA-GalNAc][ademA- |
| | | GalNAc][mG][mG][mC][mU][mG][mC] (SEQ ID NO: 1282) |
| | | [MePhosphonate-4O- |
| | | mUs][fAs][fAs][fU][fG][mG][fG][mU][mA][fG][mC][mA][mA] |
| | | [fG][mU][mU][mG][mC][mA][mAs][mGs][mG] (SEQ ID NO: |
| | | 1283) |
| 1163 | DP18164P: | [mCs][mU][mU][mG][mC][mU][mA][fC][fC][fC][fA][mU] |
| SM1405/ | DP18163G | [mU][mA][mG][mG][mA][mU][mA][mA][mG][mC][mA][mG] |
| ASM2028 | | [mC][mC][mG][ademA-GalNAc][ademA-GalNAc][ademA- |
| | | GalNAc][mG][mG][mC][mU][mG][mC] (SEQ ID NO: 1284) |
| | | [MePhosphonate-4O- |
| | | mUs][fUs][fAs][fU][fC][mC][fU][mA][mA][fU][mG][mG][mG] |
| | | [fU][mA][mG][mC][mA][mA][mGs][mGs][mG] (SEQ ID NO: |
| | | 1285) |
| 1125 | DP18110P: | [mAs][mU][mG][mA][mA][mA][mG][fA][fC][fA][fA][mA] |
| SM1405/ | DP18109G | [mG][mG][mU][mG][mG][mA][mU][mA][mG][mC][mA][mG] |
| ASM2028 | | [mC][mC][mG][ademA-GalNAc][ademA-GalNAc][ademA- |
| | | GalNAc][mG][mG][mC][mU][mG][mC] (SEQ ID NO: 1286) |
| | | [MePhosphonate-4O- |
| | | mUs][fAs][fUs][fC][fC][mA][fC][mC][mU][fU][mU][mG][mU] |
| | | [fC][mU][mU][mU][mC][mA][mUs][mGs][mG] (SEQ ID NO: |
| | | 1287) |
| 2205 | DP17955P: | [mCs][mU][mG][mU][mU][mG][mA][fA][fU][fU][fU][mU] |
| SM1405/ | DP17954G | [mG][mU][mA][mU][mU][mA][mU][mA][mG][mC][mA][mG] |
| ASM2028 | | [mC][mC][mG][ademA-GalNAc][ademA-GalNAc][ademA- |
| | | GalNAc][mG][mG][mC][mU][mG][mC] (SEQ ID NO: 1216) |
| | | [MePhosphonate-4O- |
| | | mUs][fAs][fUs][fA][fA][mU][fA][mC][mA][fA][mA][mA][mU] |
| | | [fU][mC][mA][mA][mC][mA][mGs][mGs][mG] (SEQ ID NO: |
| | | 1217) |

TABLE D

| SEQ ID | | |
|---|---|---|
| NO. and | | |
| Mod. | DP | |
| Pattern | Number | Modified Oligonucleotide |
| 0639 | DP18050P: | [mAs][mG][mU][mG][mA][mC][mA][fA][fC][fG][fU][mA][mC] |
| SM1405/ | DP18049G | [mC][mC][mU][mU][mC][mA][mA][mG][mC][mA][mG][mC] |
| ASM2028 | | [mC][mG][ademA-GalNAc][ademA-GalNAc][ademA- |
| | | GalNAc][mG][mG][mC][mU][mG][mC] (SEQ ID NO: 1288) |
| | | [MePhosphonate-4O- |
| | | mUs][fUs][fGs][fA][fA][mG][fG][mG][mU][fA][mC][mG][mU] |
| | | [fU][mG][mU][mC][mA][mC][mUs][mGs][mG] (SEQ ID NO: |
| | | 1289) |
| 0644 | DP18056P: | [mCs][mA][mA][mC][mG][mU][mA][fC][fC][fC][fU][mU][mC] |
| SM1405/ | DP18055G | [mA][mU][mU][mG][mA][mU][mA][mG][mC][mA][mG][mC] |
| ASM2028 | | [mC][mG][ademA-GalNAc][ademA-GalNAc][ademA- |
| | | GalNAc][mG][mG][mC][mU][mG][mC] (SEQ ID NO: 1220) |
| | | [MePhosphonate-4O- |
| | | mUs][fAs][fUs][fC][fA][mA][fU][mG][mA][fA][mG][mG][mG] |
| | | [fU][mA][mC][mG][mU][mU][mGs][mGs][mG] (SEQ ID NO: |
| | | 1221) |
| 0729 | DP18068P: | [mAs][mC][mG][mA][mA][mC][mU][fU][fU][fC][fU][mU][mC] |
| SM1405/ | DP18067G | [mA][mU][mG][mU][mG][mG][mA][mG][mC][mA][mG][mC] |
| ASM2028 | | [mC][mG][ademA-GalNAc][ademA-GalNAc][ademA- |
| | | GalNAc][mG][mG][mC][mU][mG][mC] (SEQ ID NO: 1290) |
| | | [MePhosphonate-4O- |
| | | mUs][fCs][fCs][fA][fC][mA][fU][mG][mA][fA][mG][mA][mA] |
| | | [fA][mG][mU][mU][mC][mG][mUs][mGs][mG] (SEQ ID NO: |
| | | 1291) |
| 0735 | DP18074P: | [mUs][mU][mU][mC][mU][mU][mC][fA][fU][fG][fU][mG][mG] |
| SM1405/ | DP18073G | [mA][mC][mA][mU][mC][mA][mA][mG][mC][mA][mG][mC] |
| ASM2028 | | [mC][mG][ademA-GalNAc][ademA-GalNAc][ademA- |
| | | GalNAc][mG][mG][mC][mU][mG][mC] (SEQ ID NO: 1292) |
| | | [MePhosphonate-4O- |
| | | mUs][fUs][fGs][fA][fU][mG][fU][mC][mC][fA][mC][mA][mU] |
| | | [fG][mA][mA][mG][mA][mA][mAs][mGs][mG] (SEQ ID NO: |
| | | 1293) |
| 0743 | DP18080P: | [mUs][mG][mU][mG][mG][mA][mC][fA][fU][fC][fA][mC][mC] |
| SM1405/ | DP18079G | [mA][mA][mG][mC][mU][mC][mA][mG][mC][mA][mG][mC] |
| ASM2028 | | [mC][mG][ademA-GalNAc][ademA-GalNAc][ademA- |
| | | GalNAc][mG][mG][mC][mU][mG][mC] (SEQ ID NO: 1294) |
| | | [MePhosphonate-4O- |
| | | mUs][fGs][fAs][fG][fC][mU][fU][mG][mG][fU][mG][mA][mU] |
| | | [fG][mU][mC][mC][mA][mC][mAs][mGs][mG] (SEQ ID NO: |
| | | 1295) |
| 0744 | DP18082P: | [mGs][mU][mG][mG][mA][mC][mA][fU][fC][fA][fC][mC][mA] |
| SM1405/ | DP18081G | [mA][mG][mC][mU][mC][mA][mA][mG][mC][mA][mG][mC] |
| SM2028A | | [mC][mG][ademA-GalNAc][ademA-GalNAc][ademA- |
| | | GalNAc][mG][mG][mC][mU][mG][mC] (SEQ ID NO: 1296) |
| | | [MePhosphonate-4O- |
| | | mUs][fUs][fGs][fA][fG][mC][fU][mU][mG][fG][mU][mG][mA] |
| | | [fU][mG][mU][mC][mC][mA][mCs][mGs][mG] (SEQ ID NO: |
| | | 1297) |
| 0838 | DP18086P: | [mAs][mG][mA][mU][mA][mU][mG][fC][fC][fU][fU][mC][mG] |
| SM1405/ | DP18085G | [mA][mG][mG][mA][mU][mA][mA][mG][mC][mA][mG][mC] |
| ASM2028 | | [mC][mG][ademA-GalNAc][ademA-GalNAc][ademA- |
| | | GalNAc][mG][mG][mC][mU][mG][mC] (SEQ ID NO: 1298) |
| | | [MePhosphonate-4O- |
| | | mUs][fUs][fAs][fU][fC][mC][fU][mC][mG][fA][mA][mG][mG] |
| | | [fC][mA][mU][mA][mU][mC][mUs][mGs][mG] (SEQ ID NO: |
| | | 1299) |
| 1126 | DP18112P: | [mUs][mG][mA][mA][mA][mG][mA][fC][fA][fA][fA][mG][mG] |
| SM1405/ | DP18111G | [mU][mG][mG][mA][mU][mA][mA][mG][mC][mA][mG][mC] |
| ASM2028 | | [mC][mG][ademA-GalNAc][ademA-GalNAc][ademA- |
| | | GalNAc][mG][mG][mC][mU][mG][mC] (SEQ ID NO: 1224) |
| | | [MePhosphonate-4O- |
| | | mUs][fUs][fAs][fU][fC][mC][fA][mC][mC][fU][mU][mU][mG] |
| | | [fU][mC][mU][mU][mU][mC][mAs][mGs][mG] (SEQ ID NO: |
| | | 1225) |
| 1143 | DP18136P: | [mUs][mA][mC][mA][mU][mG][mA][fG][fC][fA][fA][mG][mA] |
| SM1405/ | DP18135G | [mU][mU][mU][mG][mC][mA][mA][mG][mC][mA][mG][mC] |
| ASM2028 | | [mC][mG][ademA-GalNAc][ademA-GalNAc][ademA- |
| | | GalNAc][mG][mG][mC][mU][mG][mC] (SEQ ID NO: 1230) |
| | | [MePhosphonate-4O- |
| | | mUs][fUs][fGs][fC][fA][mA][fA][mU][mC][fU][mU][mG][mC] |
| | | [fU][mC][mA][mU][mG][mU][mAs][mGs][mG] (SEQ ID NO: |
| | | 1231) |
| 1147 | DP18140P: | [mUs][mG][mA][mG][mC][mA][mA][fG][fA][fU][fU][mU][mG] |
| SM1405/ | DP18139G | [mC][mA][mA][mC][mU][mU][mA][mG][mC][mA][mG][mC] |
| ASM2028 | | [mC][mG][ademA-GalNAc][ademA-GalNAc][ademA- |
| | | GalNAc][mG][mG][mC][mU][mG][mC] (SEQ ID NO: 1232) |
| | | [MePhosphonate-4O- |
| | | mUs][fAs][fAs][fG][fU][mU][fG][mC][mA][fA][mA][mU][mC] |
| | | [fU][mU][mG][mC][mU][mC][mAs][mGs][mG] (SEQ ID NO: |
| | | 1233) |
| 1152 | DP18150P: | [mAs][mA][mG][mA][mU][mU][mU][fG][fC][fA][fA][mC][mU] |
| SM1405/ | DP18149G | [mU][mG][mC][mU][mA][mC][mA][mG][mC][mA][mG][mC] |
| ASM2028 | | [mC][mG][ademA-GalNAc][ademA-GalNAc][ademA- |
| | | GalNAc][mG][mG][mC][mU][mG][mC] (SEQ ID NO: 1234) |
| | | [MePhosphonate-4O- |
| | | mUs][fGs][fUs][fA][fG][mC][fA][mA][mG][fU][mU][mG][mC] |
| | | [fA][mA][mA][mU][mC][mU][mUs][mGs][mG] (SEQ ID NO: |
| | | 1235) |
| 1173 | DP18168P: | [mAs][mU][mU][mA][mG][mG][mA][fU][fA][fA][fU][mG][mU] |
| SM1405/ | DP18167G | [mC][mU][mU][mA][mU][mG][mA][mG][mC][mA][mG][mC] |
| ASM2028 | | [mC][mG][ademA-GalNAc][ademA-GalNAc][ademA- |
| | | GalNAc][mG][mG][mC][mU][mG][mC] (SEQ ID NO: 1262) |
| | | [MePhosphonate-4O- |
| | | mUs][fCs][fAs][fU][fA][mA][fG][mA][mC][fA][mU][mU][mA] |
| | | [fU][mC][mC][mU][mA][mA][mUs][mGs][mG] (SEQ ID NO: |
| | | 1263) |
| 1697 | DP18206P: | [mCs][mU][mC][mU][mG][mA][mG][fC][fU][fG][fA][mG][mU] |
| SM1405/ | DP18205G | [mU][mG][mG][mU][mU][mU][mA][mG][mC][mA][mG][mC] |
| ASM2028 | | [mC][mG][ademA-GalNAc][ademA-GalNAc][ademA- |
| | | GalNAc][mG][mG][mC][mU][mG][mC] (SEQ ID NO: 1254) |
| | | [MePhosphonate-4O- |
| | | mUs][fAs][fAs][fA][fC][mC][fA][mA][mC][fU][mC][mA][mG] |
| | | [fC][mU][mC][mA][mG][mA][mGs][mGs][mG] (SEQ ID NO: |
| | | 1255) |
| 1699 | DP17927P: | [mCs][mU][mG][mA][mG][mC][mU][fG][fA][fG][fU][mU][mG] |
| SM1405/ | DP17926G | [mG][mU][mU][mU][mU][mA][mA][mG][mC][mA][mG][mC] |
| ASM2028 | | [mC][mG][ademA-GalNAc][ademA-GalNAc][ademA- |
| | | GalNAc][mG][mG][mC][mU][mG][mC] (SEQ ID NO: 1188) |
| | | [MePhosphonate-4O- |
| | | mUs][fUs][fAs][fA][fA][mA][fC][mC][mA][fA][mC][mU][mC] |
| | | [fA][mG][mC][mU][mC][mA][mGs][mGs][mG] (SEQ ID NO: |
| | | 1189) |
| 1703 | DP17929P: | [mGs][mC][mU][mG][mA][mG][mU][fU][fG][fG][fU][mU][mU] |
| SM1405/ | DP17928G | [mU][mA][mU][mG][mA][mA][mA][mG][mC][mA][mG][mC] |
| ASM2028 | | [mC][mG][ademA-GalNAc][ademA-GalNAc][ademA- |
| | | GalNAc][mG][mG][mC][mU][mG][mC] (SEQ ID NO: 1190) |
| | | [MePhosphonate-4O- |
| | | mUs][fUs][fUs][fC][fA][mU][fA][mA][mA][fA][mC][mC][mA] |
| | | [fA][mC][mU][mC][mA][mG][mCs][mGs][mG] (SEQ ID NO: |
| | | 1191) |
| 2140 | DP18272P: | [mCs][mU][mU][mU][mU][mU][mC][fA][fC][fC][fU][mA][mA] |
| SM1405/ | DP18271G | [mC][mU][mA][mA][mA][mA][mA][mG][mC][mA][mG][mC] |
| ASM2028 | | [mC][mG][ademA-GalNAc][ademA-GalNAc][ademA- |
| | | GalNAc][mG][mG][mC][mU][mG][mC] (SEQ ID NO: 1244) |
| | | [MePhosphonate-4O- |
| | | mUs][fUs][fUs][fU][fU][mA][fG][mU][mU][fA][mG][mG][mU] |
| | | [fG][mA][mA][mA][mA][mA][mGs][mGs][mG] (SEQ ID NO: |
| | | 1245) |
| 2144 | DP18276P: | [mUs][mU][mC][mA][mC][mC][mU][fA][fA][fC][fU][mA][mA] |
| SM1405/ | DP18275G | [mA][mA][mU][mA][mA][mU][mA][mG][mC][mA][mG][mC] |
| ASM2028 | | [mC][mG][ademA-GalNAc][ademA-GalNAc][ademA- |
| | | GalNAc][mG][mG][mC][mU][mG][mC] (SEQ ID NO: 1246) |
| | | [MePhosphonate-4O- |
| | | mUs][fAs][fUs][fU][fA][mU][fU][mU][mU][fA][mG][mU][mU] |
| | | [fA][mG][mG][mU][mG][mA][mAs][mGs][mG] (SEQ ID NO: |
| | | 1247) |
| 2149 | DP18286P: | [mCs][mU][mA][mA][mC][mU][mA][fA][fA][fA][fU][mA][mA] |
| SM1405/ | DP18285G | [mU][mG][mU][mU][mU][mA][mA][mG][mC][mA][mG][mC] |
| ASM2028 | | [mC][mG][ademA-GalNAc][ademA-GalNAc][ademA- |
| | | GalNAc][mG][mG][mC][mU][mG][mC] (SEQ ID NO: 1250) |
| | | [MePhosphonate-4O- |
| | | mUs][fUs][fAs][fA][fA][mC][fA][mU][mU][fA][mU][mU][mU] |
| | | [fU][mA][mG][mU][mU][mA][mGs][mGs][mG] (SEQ ID NO: |
| | | 1251) |
| 2156 | DP17939P: | [mAs][mA][mA][mU][mA][mA][mU][fG][fU][fU][fU][mA][mA] |
| SM1405/ | DP17938G | [mA][mG][mA][mG][mU][mU][mA][mG][mC][mA][mG][mC] |
| ASM2028 | | [mC][mG][ademA-GalNAc][ademA-GalNAc][ademA- |
| | | GalNAc][mG][mG][mC][mU][mG][mC] (SEQ ID NO: 1200) |
| | | [MePhosphonate-4O- |
| | | mUs][fAs][fAs][fC][fU][mC][fU][mU][mU][fA][mA][mA][mC] |
| | | [fA][mU][mU][mA][mU][mU][mUs][mGs][mG] (SEQ ID NO: |
| | | 1201) |
| 2195 | DP17949P: | [mGs][mC][mG][mU][mU][mG][mU][fU][fA][fC][fC][mU][mG] |
| SM1405/ | DP17948G | [mU][mU][mG][mA][mA][mU][mA][mG][mC][mA][mG][mC] |
| ASM2028 | | [mC][mG][ademA-GalNAc][ademA-GalNAc][ademA- |
| | | GalNAc][mG][mG][mC][mU][mG][mC] (SEQ ID NO: 1300) |
| | | [MePhosphonate-4O- |
| | | mUs][fAs][fUs][fU][fC][mA][fA][mC][mA][fG][mG][mU][mA] |
| | | [fA][mC][mA][mA][mC][mG][mCs][mGs][mG] (SEQ ID NO: |
| | | 1301) |
| 2205 | DP17955P: | [mCs][mU][mG][mU][mU][mG][mA][fA][fU][fU][fU][mU][mG] |
| SM1405/ | DP17954G | [mU][mA][mU][mU][mA][mU][mA][mG][mC][mA][mG][mC] |
| ASM2028 | | [mC][mG][ademA-GalNAc][ademA-GalNAc][ademA- |
| | | GalNAc][mG][mG][mC][mU][mG][mC] (SEQ ID NO: 1216) |
| | | [MePhosphonate-4O- |
| | | mUs][fAs][fUs][fA][fA][mU][fA][mC][mA][fA][mA][mA][mU] |
| | | [fU][mC][mA][mA][mC][mA][mGs][mGs][mG] (SEQ ID NO: |
| | | 1217) |

The application's sequence listing, which the Patent Office published only in electronic form, follows.

SEQUENCE LISTING (1303 sequences)

SEQ ID NO: 1 - DNA, 2753 bp, Homo sapiens
  source 1..2753: mol_type = unassigned DNA
agagagcgcttgcgggcgccgggcggagctgctgcggatcaggacccgagccgattcccgatcccgacccagatcctaacccgcgcccccgccccgccgccgccgccatgtacgacgcagagcgcggctggagcttgtccttcgcgggctgcggcttcctgggcttctaccacgtcggggcgacccgctgcctgagcgagcacgccccgcacctcctccgcgacgcgcgcatgttgttcggcgcttcggccggggcgttgcactgcgtcggcgtcctctccggtatcccgctggagcagactctgcaggtcctctcagatcttgtgcggaaggccaggagtcggaacattggcatcttccatccatccttcaacttaagcaagttcctccgacagggtctctgcaaatgcctcccggccaatgtccaccagctcatctccggcaaaataggcatctctcttaccagagtgtctgatggggaaaacgttctggtgtctgactttcggtccaaagacgaagtcgtggatgccttggtatgttcctgcttcatccccttctacagtggccttatccctccttccttcagaggcgtgcgatatgtggatggaggagtgagtgacaacgtacccttcattgatgccaaaacaaccatcaccgtgtcccccttctatggggagtacgacatctgccctaaagtcaagtccacgaactttcttcatgtggacatcaccaagctcagtctacgcctctgcacagggaacctctaccttctctcgagagcttttgtccccccggatctcaaggtgctgggagagatatgccttcgaggatatttggatgcattcaggttcttggaagagaagggcatctgcaacaggccccagccaggcctgaagtcatcctcagaagggatggatcctgaggtcgccatgcccagctgggcaaacatgagtctggattcttccccggagtcggctgccttggctgtgaggctggagggagatgagctgctagaccacctgcgtctcagcatcctgccctgggatgagagcatcctggacaccctctcgcccaggctcgctacagcactgagtgaagaaatgaaagacaaaggtggatacatgagcaagatttgcaacttgctacccattaggataatgtcttatgtaatgctgccctgtaccctgcctgtggaatctgccattgcgattgtccagagactggtgacatggcttccagatatgcccgacgatgtcctgtggttgcagtgggtgacctcacaggtgttcactcgagtgctgatgtgtctgctccccgcctccaggtcccaaatgccagtgagcagccaacaggcctccccatgcacacctgagcaggactggccctgctggactccctgctcccccaagggctgtccagcagagaccaaagcagaggccaccccgcggtccatcctcaggtccagcctgaacttcttcttgggcaataaagtacctgctggtgctgaggggctctccacctttcccagtttttcactagagaagagtctgtgagtcacttgaggaggcgagtctagcagattctttcagaggtgctaaagtttcccatctttgtgcagctacctccgcattgctgtgtagtgacccctgcctgtgacgtggaggatcccagcctctgagctgagttggttttatgaaaagctaggaagcaacctttcgcctgtgcagcggtccagcacttaactctaatacatcagcatgcgttaattcagctggttgggaaatgacaccaggaagcccagtgcagagggtcccttactgactgtttcgtggccctattaatggtcagactgttccagcatgaggttcttagaatgacaggtgtttggatgggtgggggccttgtgatggggggtaggctggcccatgtgtgatcttgtggggtggagggaagagaatagcatgatcccacttccccatgctgtgggaaggggtgcagttcgtccccaagaacgacactgcctgtcaggtggtctgcaaagatgataaccttgactactaaaaacgtctccatggcgggggtaacaagatgataatctacttaattttagaacacctttttcacctaactaaaataatgtttaaagagttttgtataaaaatgtaaggaagcgttgttacctgttgaattttgtattatgtgaatcagtgagatgttagtagaataagccttaaaaaaaaaaaaatcggttgggtgcagtggcacacggctgtaatcccagcactttgggaggccaaggttggcagatcacctgaggtcaggagttcaagaccagtctggccaacatagcaaaaccctgtctctactaaaaatacaaaaattatctgggcatggtggtgcatgcctgtaatcccagctattcggaaggctgaggcaggagaatcacttgaacccaggaggcggaggttgcggtgagctgagattgcaccatttcattccagcctgggcaacatgagtgaaagtctgactcaaaaaaaaaaaatttaaaaaacaaaataatctagtgtgcagggcattcacctcagccccccaggcaggagccaagcacagcaggagcttccgcctcctctccactggagcacacaacttgaacctggcttattttctgcagggaccagccccacatggtcagtgagtttctccccatgtgtggcgatgagagagtgtagaaataaagacacaagacaaagaga

SEQ ID NO: 2 - protein, 481 aa, Homo sapiens
MYDAERGWSLSFAGCGFLGFYHVGATRCLSEHAPHLLRDARMLFGASAGALHCVGVLSGIPLEQTLQVLSDLVRKARSRNIGIFHPSFNLSKFLRQGLCKCLPANVHQLISGKIGISLTRVSDGENVLVSDFRSKDEVVDALVCSCFIPFYSGLIPPSFRGVRYVDGGVSDNVPFIDAKTTITVSPFYGEYDICPKVKSTNFLHVDITKLSLRLCTGNLYLLSRAFVPPDLKVLGEICLRGYLDAFRFLEEKGICNRPQPGLKSSSEGMDPEVAMPSWANMSLDSSPESAALAVRLEGDELLDHLRLSILPWDESILDTLSPRLATALSEEMKDKGGYMSKICNLLPIRIMSYVMLPCTLPVESAIAIVQRLVTWLPDMPDDVLWLQWVTSQVFTRVLMCLLPASRSQMPVSSQQASPCTPEQDWPCWTPCSPKGCPAETKAEATPRSILRSSLNFFLGNKVPAGAEGLSTFPSFSLEKSL

SEQ ID NO: 3 - DNA, 2753 bp, synthetic construct
  misc_feature 1..2753: note = Description of Artificial Sequence: Synthetic polynucleotide
  source 1..2753: mol_type = other DNA
agagagcgcttgcgggcgccgggcggagctgctgcggatcaggacccgagccgattcccgatcccgacccagatcctaacccgcgcccccgccccgccgccgccgccatgtacgacgcagagcgcggctggagcttgtccttcgcgggctgcggcttcctgggcttctaccacgtcggggcgacccgctgcctgagcgagcacgccccgcacctcctccgcgacgcgcgcatgttgttcggcgcttcggccggggcgttgcactgcgtcggcgtcctctccggtatcccgctggagcagactctgcaggtcctctcagatcttgtgcggaaggccaggagtcggaacattggcatcttccatccatccttcaacttaagcaagttcctccgacagggtctctgcaaatgcctcccggccaatgtccaccagctcatctccggcaaaataggcatctctcttaccagagtgtctgatggggaaaacgttctggtgtctgactttcggtccaaagacgaagtcgtggatgccttggtatgttcctgcttcatgcccttctacagtggccttatccctccttccttcagaggcgtgcgatatgtggatggaggagtgagtgacaacgtacccttcattgatgccaaaacaaccatcaccgtgtcccccttctatggggagtacgacatctgccctaaagtcaagtccacgaactttcttcatgtggacatcaccaagctcagtctacgcctctgcacagggaacctctaccttctctcgagagcttttgtccccccggatctcaaggtgctgggagagatatgccttcgaggatatttggatgcattcaggttcttggaagagaagggcatctgcaacaggccccagccaggcctgaagtcatcctcagaagggatggatcctgaggtcgccatgcccagctgggcaaacatgagtctggattcttccccggagtcggctgccttggctgtgaggctggagggagatgagctgctagaccacctgcgtctcagcatcctgccctgggatgagagcatcctggacaccctctcgcccaggctcgctacagcactgagtgaagaaatgaaagacaaaggtggatacatgagcaagatttgcaacttgctacccattaggataatgtcttatgtaatgctgccctgtaccctgcctgtggaatctgccattgcgattgtccagagactggtgacatggcttccagatatgcccgacgatgtcctgtggttgcagtgggtgacctcacaggtgttcactcgagtgctgatgtgtctgctccccgcctccaggtcccaaatgccagtgagcagccaacaggcctccccatgcacacctgagcaggactggccctgctggactccctgctcccccaagggctgtccagcagagaccaaagcagaggccaccccgcggtccatcctcaggtccagcctgaacttcttcttgggcaataaagtacctgctggtgctgaggggctctccacctttcccagtttttcactagagaagagtctgtgagtcacttgaggaggcgagtctagcagattctttcagaggtgctaaagtttcccatctttgtgcagctacctccgcattgctgtgtagtgacccctgcctgtgacgtggaggatcccagcctctgagctgagttggttttatgaaaagctaggaagcaacctttcgcctgtgcagcggtccagcacttaactctaatacatcagcatgcgttaattcagctggttgggaaatgacaccaggaagcccagtgcagagggtcccttactgactgtttcgtggccctattaatggtcagactgttccagcatgaggttcttagaatgacaggtgtttggatgggtgggggccttgtgatggggggtaggctggcccatgtgtgatcttgtggggtggagggaagagaatagcatgatcccacttccccatgctgtgggaaggggtgcagttcgtccccaagaacgacactgcctgtcaggtggtctgcaaagatgataaccttgactactaaaaacgtctccatggcgggggtaacaagatgataatctacttaattttagaacacctttttcacctaactaaaataatgtttaaagagttttgtataaaaatgtaaggaagcgttgttacctgttgaattttgtattatgtgaatcagtgagatgttagtagaataagccttaaaaaaaaaaaaatcggttgggtgcagtggcacacggctgtaatcccagcactttgggaggccaaggttggcagatcacctgaggtcaggagttcaagaccagtctggccaacatagcaaaaccctgtctctactaaaaatacaaaaattatctgggcatggtggtgcatgcctgtaatcccagctattcggaaggctgaggcaggagaatcacttgaacccaggaggcggaggttgcggtgagctgagattgcaccatttcattccagcctgggcaacatgagtgaaagtctgactcaaaaaaaaaaaatttaaaaaacaaaataatctagtgtgcagggcattcacctcagccccccaggcaggagccaagcacagcaggagcttccgcctcctctccactggagcacacaacttgaacctggcttattttctgcagggaccagccccacatggtcagtgagtttctccccatgtgtggcgatgagagagtgtagaaataaagacacaagacaaagaga

SEQ ID NO: 4 - protein, 481 aa, synthetic construct [sequence omitted]

SEQ ID NO: 5 - DNA, 2291 bp, Macaca fascicularis
  source 1..2291: mol_type = unassigned DNA
cgagggaggcggggcggacgtcgcgcgtggaaagcccgggcggagacgcggcggctgggtcacgagcgcttgcgggcgcccggcggagctgctgcggatcaggacccgagccgatccccgatcccgactccgatccggatccgcgcccccgcccccgccccgccatgtacgacgccgagcgcggctggagcttgtccttcgcgggctgcggcttcctgggcttctaccacgtcggggcgacccggtgcctgagcgagcacgccccgcacctcctccgcgacgcgcgcatgttgttcggcgcctcggccggggcgttgcactgcgtcggcgtcctctccgggatcccgctggagcagactctgcaggtcctctcagatcttgtccggaaggccaggagtcggaacattggtatcttccatccatccttcaacataggcaagttcctccgacaggatctctacaaatacctcccggccaatgtccaccagctcatctctggcaaaatatgcgtctcactcaccagagtgtctgatggggaaaacgttctggtgtctgactttcagtccaaagacgaagtcgtggatgccttgatttgttcctgcttcatccctttctacagtggccttatccctccttccttcagaggcgtgcgatatgtggatggaggagcgagtgacaacgtacccttcattgatgccaagacaaccatcaccgtgtcgcccttctatggggagtacgacatctgccctaaagtcaagtccaccaactttcttcatgtggacatcaccaagctcagcctacgcctctgcacagggaacctctaccttctctcaagagcgtttgtccccccggatctcaaggtgctgggagagatatgccttcgaggatatttggacgcgttcaggttcttggaagagaagggcatctgcaacaagccccagcggggtctgaagtcatcctcagaagggatggattctgaggtcactgcgcccggctgggaaaacacaagtctggattcttccccggagccggctgccttggctatgaggctggatggagatgagctgctagaccacctgcgtctcagcatcctgccctgggatgagagcatcctggacaccctgtcgcccgagctcgctacagtgagtgaagcaatgaaagacaaaggtggatacatgagcaagatttgcaacttgctacccattaggataatatcttatgtgatgctgccctgtaccctgcctgtggagtctgccattgcgattgtccagagactggtgacatggcttccagatatgcccgacgatgtgcagtggctgcagtgggtgacctcacaggtcttcactcgagcgctgatgtgtctgcttcccgcctccaggtcccaaatgccagtgagcagcgaacaggcctccccatgcaaaccggagcaggactggcactgctggactccctgctcccccgaggactgtcctgcagaggccaaagcagaggctaccccacggtccatcctcaggtccagcctgaacttcttctggggcaataaagtacctgctggtgctgaggggctctccacctttcccagtttttcactggagaagaatttgtgagtcatttgaggaggcgagtctaggagattctttcagaggtgctaaagcttcccatctttgtgcagctacctccgcattgccgtgtagtgacccctgcctgtgacgtggaggatcccagcctctgagctgagttggttttatgaaaagctaggaagcaatgtttggtctgtgcagcagtccagcacttaagtctaatacgtcagcatgcgttagttcagctggttgggaaatgacaccgggaagcctagcgcagagggtcccttactgactatttcatggtcctattaatggtcagactgttccagtgtgaggttcttagaatgactagtgtttggatgggtgggggccttgtggtggggggtgggctggcctatgtgtgatcttgtggggtggaaggaagagagtagcacaatcccacctccccatgccgtgggaaggggtgcacttggttcccaagaaggacactgcctgtcaggtggcctgcaaatataataaccttgacaactaaaaacctctccatgggggtgggaggtaccaagataataaccgatttacattttagagcacctttttcacctaactaaaataatgtttaaagagttttatataaaaatgtaaggaagagttgttatctgttgaattttgtattatatgaatcagtgagatgttaatagaataagcctt

SEQ ID NO: 6 - protein, 480 aa, Macaca fascicularis
MYDAERGWSLSFAGCGFLGFYHVGATRCLSEHAPHLLRDARMLFGASAGALHCVGVLSGIPLEQTLQVLSDLVRKARSRNIGIFHPSFNIGKFLRQDLYKYLPANVHQLISGKICVSLTRVSDGENVLVSDFQSKDEVVDALICSCFIPFYSGLIPPSFRGVRYVDGGASDNVPFIDAKTTITVSPFYGEYDICPKVKSTNFLHVDITKLSLRLCTGNLYLLSRAFVPPDLKVLGEICLRGYLDAFRFLEEKGICNKPQRGLKSSSEGMDSEVTAPGWENTSLDSSPEPAALAMRLDGDELLDHLRLSILPWDESILDTLSPELATVSEAMKDKGGYMSKICNLLPIRIISYVMLPCTLPVESAIAIVQRLVTWLPDMPDDVQWLQWVTSQVFTRALMCLLPASRSQMPVSSEQASPCKPEQDWHCWTPCSPEDCPAEAKAEATPRSILRSSLNFFWGNKVPAGAEGLSTFPSFSLEKNL

SEQ ID NO: 7 - DNA, 4675 bp, Mus musculus
  source 1..4675: mol_type = unassigned DNA
cacccgaagacagcttaggcggctgcggctctttaagctcagagcagcaacaccgggagcagagctgaactgcagcgccgcccggagcttcaagcaccatgtatgacccagagcgccgctggagcctgtcgtttgcaggctgcggcttcctgggcttctaccacgtcggggctacgctatgtctgagcgagcgcgccccgcacctcctccgcgatgcgcgcactttctttggctgctcggccggtgcactgcacgcggtcaccttcgtgtgcagtctccctctcggtgcgtccacggccactacccaggccccgcgtgcggggaggggttgctacacctggggaatcggtaacactttccggggtgcccgaagaaacctgtccggagagctctcatccttcccggtgccgttgagcactcagctggagaccctgggcctgtcacctggcgtgggatttcccggggccggctggagcagacgcgctccgagcatcttcttcctgacccgctctggcgccctggtcctgtcagctgggtcatccctgagcagcagggaacgacgcaggtttgccgggtcctctggtccctgagccgcagaaggccgtataatggagatcctcatggacctcgtgcggaaagccaggagccgcaacatcggcaccctccacccgttcttcaacattaacaagtgcatcagagacgggctccaggagagcctcccagacaatgtccaccaggtcatttctggcaaggttcacatctcactcaccagggtgtcggatggggagaacgtgctggtgtctgagttccattccaaagacgaagtcgtggatgccctggtgtgttcctgcttcattcccctcttctctggcctaatccctccttccttccgaggcgagcggtacgtggacggaggagtgagcgacaacgtccctgtgctggatgccaaaaccaccatcacggtgtcacctttctacggtgagcatgacatctgccccaaagtcaagtccaccaacttcttccacgtgaatatcaccaacctcagcctccgcctctgcactgggaacctccaacttctgaccagagcgctcttcccgtctgatgtgaaggtgatgggagagctgtgctatcaagggtacctggacgccttccggttcctggaggagaatggcatctgtaacgggccacagcgcagcctgagtctgtccttggtggcgccagaagcctgcttggaaaatggcaaacttgtgggagacaaggtgccagtcagcctatgctttacagatgagaacatctgggagacactgtcccccgagctcagcacagctctgagtgaagcgattaaggacagggagggctacctgagcaaagtctgcaacctcctgcccgtcaggatcctgtcctacatcatgctgccctgcagtctgcccgtggagtcggctatcgctgcagtccacaggctggtgacatggctccctgatatccaggatgatatccagtggctacaatgggcgacatcccaggtttgtgcccgaatgacgatgtgcctgctcccctctaccagcatgagattcctgggacaatcccaattccttggcctccattgtatcaaagggctgaaaaccaaagggaaggcacagctgtctcttcagcatgcctcttctgccagaaccactgcaaggtttggtgctcaggctgtgcaaacattctagcaatgtttgactcagtgtcaagcaggtgacaaggaacatggtgctgtgtggggggaacccatggcccaggtgagggcttattggtgggtgaagctgtgggtgttcaggtggtggagaaggccttaagggatgggactgacacctcagcactgaaggcaggaggaagctgtggctctgggttgcacccctgcctggctccaccctctctggcatctgtagaagttacagctggttcttcctctcagccccatgctcccagaaataagactcagacccaaattatagttacaaataccttggccatatagctaggctcttctcagactagctcataacttaactcattaattttaacctccatcctgccacatggctggtggcctgtgctcaggtaccatgagtccagctcttcacatctttccggatgaatcttccataattctttctgcctcctggatgttccaccttctattccaccttttcctataggccatggttttgtttttgttttttttttccaaatttaatttaattaattaatttatttatttttggtttttcgagacagggtttctctgtatcgccctggctgtcctggaactcactatgtaagccaggctggcctcaaactcagaaatccgcctgcctctgcctcctgagtgctgggattaaaggcgtgcgcaaccatgcccggtgtggtttttttttttttttaattgacaggtggatgcatctatataatccataacatattctctctacaggtatctattaggttttgggtgaggtgtggagttctagggaactctgagagaaattcctggggagtaagtggtttatcaagttgattggaggagtttttaatgctatggacagacagacagaaggacaacagcatagtcggggctaccagggagttcaggccccggcatcggagatagaagcaggatggggtctttgaagagattctgagcccacacagcagaggagggactctctctttagagcttttgaggatgagggaggttgactgcaagagcctacagccaggctcgaggcaggcagggggtggggagcaggatgtaaaccccttcgatgctgacagactcacttctggggtaaaatattatgagatgcctgtcagtgtctgtgaagagacctgagcagagtctggattctgacatcaatcatgttcttacaatactgaagacctgagagcctgcaatcttggtttgtaaattgctggtctccgtgcttccagtgaacttggacattcttctcatggttggtccaggagaggccaaagctgagggcaccctgccttccacccccagtccagcttgaccttttatctggagcaacagtgtctagatgatgggtgggtgaggggtgctatactgtctgtccctctgggaagggttctgttacttttggaggcagctaggaagtttctctgtgcagctgccccctggtgctgtgtggtgacctcattgcctgtgaccccaggatcacaggatctgggctaaagtggtagtccatagaaaccaaagacaatgatttggtgtttagaaagctactcttggtctgggtgaagtctggtgcttaagggctatcacaaagagcgtgtcaaaccatctctcagcctgtgagtcagtggggagcccaagggcatcagtgtttggaaactggaatccaaaccgggcaatctcggaaggaaactgtttaggaattgtgatgggacgggccgtggctgtctctgaaaagggcctgccagataacttattacttttaaggacacctttggctcttactaatttataaagcattttatataaacacaccagggagtgcatggtgaactacacgtatgatcagttaagtggggctagaattaggtagggagagcatcggacctctgcctcctcaacctcaacttgcttgctttctccactggctccaaatctttgtatagtcatcagccatgaccacctctctccctccccatctactaccagcagcgttaatgggaataagtacccacttctctcaggtgtactatacagctgtgggtgtggtgtgtgtttcctgtaattcacactttagaaaggaaacaagcaaacaaaagaaaccaggtgctgcccatactcctaagtgtagacagtgaaggtgtgtgtctcccatgcctgagtctcctggaggcctagtgagctccaggttcatgcaagcacatcaggaggaatcatataatctcagcacggttgatccagatgggataagaaaggactctgggagagagaatgtggttctagagacaaagtgtctaggctacacagaagataagactgtcccaaggaaagaaaagaaaccaggaactagggtgcagctcagttgtcagaggacttctctaggcttgaagcccagagtccaatctcagcaccttataaactgtggagtgacaggcagtgacatcggcctgtaatcccaacactcaagcagtagaggcaagaggatcataagttcaaggtcttccttggctatttagggagttggaggttagctctggctacatgagaccctgtctcaaaaaaaaaaaaaaaaaaaagtagaaacttctgccttgctttgagctgcccctttctggacgtttctcatcagtagagaatattcctgccaccctatcagacaaaactcccactggtttggagtctctccattctcaggaacacctcaggagtcagacagtgagcagcagggagcaatgtcttgacttgtaagccccttagcaaggctggttcatttgtttattaaaagcaggtgtgggtgaatttatgcaaatgagtatgcaaactagtggaacagcagaaggattgaatggatacaccaaaaataaccacaactgtttaagggaaaagggtccataataaatgtggggaacaaaaaacaaataaatgtgatttttttta

SEQ ID NO: 8 - protein, 367 aa, Mus musculus
MEILMDLVRKARSRNIGTLHPFFNINKCIRDGLQESLPDNVHQVISGKVHISLTRVSDGENVLVSEFHSKDEVVDALVCSCFIPLFSGLIPPSFRGERYVDGGVSDNVPVLDAKTTITVSPFYGEHDICPKVKSTNFFHVNITNLSLRLCTGNLQLLTRALFPSDVKVMGELCYQGYLDAFRFLEENGICNGPQRSLSLSLVAPEACLENGKLVGDKVPVSLCFTDENIWETLSPELSTALSEAIKDREGYLSKVCNLLPVRILSYIMLPCSLPVESAIAAVHRLVTWLPDIQDDIQWLQWATSQVCARMTMCLLPSTSMRFLGQSQFLGLHCIKGLKTKGKAQLSLQHASSARTTARFGAQAVQTF

SEQ ID NO: 9 - RNA, 25 nt, synthetic construct
  misc_feature 1..25: note = Description of Artificial Sequence: Synthetic oligonucleotide
  source 1..25: mol_type = other RNA
tctgcaggtcctctcagatcttgtg

SEQ ID NO: 10 - RNA, 27 nt, synthetic construct
  misc_feature 1..27: note = Description of Artificial Sequence: Synthetic oligonucleotide
  source 1..27: mol_type = other RNA
cacaagatctgagaggacctgcagagt

SEQ ID NO: 11 - RNA, 25 nt, synthetic construct
  misc_feature 1..25: note = Description of Artificial Sequence: Synthetic oligonucleotide
  source 1..25: mol_type = other RNA
aggtcctctcagatcttgtgcggaa

SEQ ID NO: 12 - RNA, 27 nt, synthetic construct
  misc_feature 1..27: note = Description of Artificial Sequence: Synthetic oligonucleotide
  source 1..27: mol_type = other RNA
ttccgcacaagatctgagaggacctgc

SEQ ID NO: 13 - RNA, 25 nt, synthetic construct
  misc_feature 1..25: note = Description of Artificial Sequence: Synthetic oligonucleotide
  source 1..25: mol_type = other RNA
attggcatcttccatccatccttca

SEQ ID NO: 14 - RNA, 27 nt, synthetic construct
  misc_feature 1..27: note = Description of Artificial Sequence: Synthetic oligonucleotide
  source 1..27: mol_type = other RNA
tgaaggatggatggaagatgccaatgt

SEQ ID NO: 15 - RNA, 25 nt, synthetic construct
  misc_feature 1..25: note = Description of Artificial Sequence: Synthetic oligonucleotide
  source 1..25: mol_type = other RNA
atcttccatccatccttcaacttaa

SEQ ID NO: 16 - RNA, 27 nt, synthetic construct
  misc_feature 1..27: note = Description of Artificial Sequence: Synthetic oligonucleotide
  source 1..27: mol_type = other RNA
ttaagttgaaggatggatggaagatgc

SEQ ID NO: 17 - RNA, 25 nt, synthetic construct
  misc_feature 1..25: note = Description of Artificial Sequence: Synthetic oligonucleotide
  source 1..25: mol_type = other RNA
tcttccatccatccttcaacttaag

SEQ ID NO: 18 - RNA, 27 nt, synthetic construct
  misc_feature 1..27: note = Description of Artificial Sequence: Synthetic oligonucleotide
  source 1..27: mol_type = other RNA
cttaagttgaaggatggatggaagatg

SEQ ID NO: 19 - RNA, 25 nt, synthetic construct
  misc_feature 1..25: note = Description of Artificial Sequence: Synthetic oligonucleotide
  source 1..25: mol_type = other RNA
ccagagtgtctgatggggaaaacgt

SEQ ID NO: 20 - RNA, 27 nt, synthetic construct
  misc_feature 1..27: note = Description of Artificial Sequence: Synthetic oligonucleotide
  source 1..27: mol_type = other RNA
acgttttccccatcagacactctggta

SEQ ID NO: 21 - RNA, 25 nt, synthetic construct
  misc_feature 1..25: note = Description of Artificial Sequence: Synthetic oligonucleotide
  source 1..25: mol_type = other RNA
gagtgtctgatggggaaaacgttct

SEQ ID NO: 22 - RNA, 27 nt, synthetic construct
  misc_feature 1..27: note = Description of Artificial Sequence: Synthetic oligonucleotide
  source 1..27: mol_type = other RNA
agaacgttttccccatcagacactctg

SEQ ID NO: 23 - RNA, 25 nt, synthetic construct
  misc_feature 1..25: note = Description of Artificial Sequence: Synthetic oligonucleotide
  source 1..25: mol_type = other RNA
atggggaaaacgttctggtgtctga

SEQ ID NO: 24 - RNA, 27 nt, synthetic construct
  misc_feature 1..27: note = Description of Artificial Sequence: Synthetic oligonucleotide
  source 1..27: mol_type = other RNA
tcagacaccagaacgttttccccatca

SEQ ID NO: 25 - RNA, 25 nt, synthetic construct
  misc_feature 1..25: note = Description of Artificial Sequence: Synthetic oligonucleotide
  source 1..25: mol_type = other RNA
ggggaaaacgttctggtgtctgact

SEQ ID NO: 26 - RNA, 27 nt, synthetic construct
  misc_feature 1..27: note = Description of Artificial Sequence: Synthetic oligonucleotide
  source 1..27: mol_type = other RNA
agtcagacaccagaacgttttccccat

SEQ ID NO: 27 - RNA, 25 nt, synthetic construct
  misc_feature 1..25: note = Description of Artificial Sequence: Synthetic oligonucleotide
  source 1..25: mol_type = other RNA
gggaaaacgttctggtgtctgactt

SEQ ID NO: 28 - RNA, 27 nt, synthetic construct
  misc_feature 1..27: note = Description of Artificial Sequence: Synthetic oligonucleotide
  source 1..27: mol_type = other RNA
aagtcagacaccagaacgttttcccca

SEQ ID NO: 29 - RNA, 25 nt, synthetic construct
  misc_feature 1..25: note = Description of Artificial Sequence: Synthetic oligonucleotide
  source 1..25: mol_type = other RNA
ggaaaacgttctggtgtctgacttt

SEQ ID NO: 30 - RNA, 27 nt, synthetic construct
  misc_feature 1..27: note = Description of Artificial Sequence: Synthetic oligonucleotide
  source 1..27: mol_type = other RNA
aaagtcagacaccagaacgttttcccc

SEQ ID NO: 31 - RNA, 25 nt, synthetic construct
  misc_feature 1..25: note = Description of Artificial Sequence: Synthetic oligonucleotide
  source 1..25: mol_type = other RNA
gaaaacgttctggtgtctgactttc

SEQ ID NO: 32 - RNA, 27 nt, synthetic construct
  misc_feature 1..27: note = Description of Artificial Sequence: Synthetic oligonucleotide
  source 1..27: mol_type = other RNA
gaaagtcagacaccagaacgttttccc

SEQ ID NO: 33 - RNA, 25 nt, synthetic construct
  misc_feature 1..25: note = Description of Artificial Sequence: Synthetic oligonucleotide
  source 1..25: mol_type = other RNA
aaaacgttctggtgtctgactttcg

SEQ ID NO: 34 - RNA, 27 nt, synthetic construct
  misc_feature 1..27: note = Description of Artificial Sequence: Synthetic oligonucleotide
  source 1..27: mol_type = other RNA
cgaaagtcagacaccagaacgttttcc

SEQ ID NO: 35 - RNA, 25 nt, synthetic construct
  misc_feature 1..25: note = Description of Artificial Sequence: Synthetic oligonucleotide
  source 1..25: mol_type = other RNA
aaacgttctggtgtctgactttcgg

SEQ ID NO: 36 - RNA, 27 nt, synthetic construct
  misc_feature 1..27: note = Description of Artificial Sequence: Synthetic oligonucleotide
  source 1..27: mol_type = other RNA
ccgaaagtcagacaccagaacgttttc

SEQ ID NO: 37 - RNA, 25 nt, synthetic construct
  misc_feature 1..25: note = Description of Artificial Sequence: Synthetic oligonucleotide
  source 1..25: mol_type = other RNA
aacgttctggtgtctgactttcggt

SEQ ID NO: 38 - RNA, 27 nt, synthetic construct
  misc_feature 1..27: note = Description of Artificial Sequence: Synthetic oligonucleotide
  source 1..27: mol_type = other RNA
accgaaagtcagacaccagaacgtttt

SEQ ID NO: 39 - RNA, 25 nt, synthetic construct
  misc_feature 1..25: note = Description of Artificial Sequence: Synthetic oligonucleotide
  source 1..25: mol_type = other RNA
acgttctggtgtctgactttcggtc

SEQ ID NO: 40 - RNA, 27 nt, synthetic construct
  misc_feature 1..27: note = Description of Artificial Sequence: Synthetic oligonucleotide
  source 1..27: mol_type = other RNA
gaccgaaagtcagacaccagaacgttt

SEQ ID NO: 41 - RNA, 25 nt, synthetic construct
  misc_feature 1..25: note = Description of Artificial Sequence: Synthetic oligonucleotide
  source 1..25: mol_type = other RNA
gttctggtgtctgactttcggtcca

SEQ ID NO: 42 - RNA, 27 nt, synthetic construct
  misc_feature 1..27: note = Description of Artificial Sequence: Synthetic oligonucleotide
  source 1..27: mol_type = other RNA
tggaccgaaagtcagacaccagaacgt

SEQ ID NO: 43 - RNA, 25 nt, synthetic construct
  misc_feature 1..25: note = Description of Artificial Sequence: Synthetic oligonucleotide
  source 1..25: mol_type = other RNA
gacgaagtcgtggatgccttggtat

SEQ ID NO: 44 - RNA, 27 nt, synthetic construct
  misc_feature 1..27: note = Description of Artificial Sequence: Synthetic oligonucleotide
  source 1..27: mol_type = other RNA
ataccaaggcatccacgacttcgtctt

SEQ ID NO: 45 - RNA, 25 nt, synthetic construct
  misc_feature 1..25: note = Description of Artificial Sequence: Synthetic oligonucleotide
  source 1..25: mol_type = other RNA
acgaagtcgtggatgccttggtatg

SEQ ID NO: 46 - RNA, 27 nt, synthetic construct
  misc_feature 1..27: note = Description of Artificial Sequence: Synthetic oligonucleotide
  source 1..27: mol_type = other RNA
cataccaaggcatccacgacttcgtct

SEQ ID NO: 47 - RNA, 25 nt, synthetic construct
  misc_feature 1..25: note = Description of Artificial Sequence: Synthetic oligonucleotide
  source 1..25: mol_type = other RNA
cgaagtcgtggatgccttggtatgt

SEQ ID NO: 48 - RNA, 27 nt, synthetic construct
  misc_feature 1..27: note = Description of Artificial Sequence: Synthetic oligonucleotide
  source 1..27: mol_type = other RNA
acataccaaggcatccacgacttcgtc

SEQ ID NO: 49 - RNA, 25 nt, synthetic construct
  misc_feature 1..25: note = Description of Artificial Sequence: Synthetic oligonucleotide
  source 1..25: mol_type = other RNA
cagaggcgtgcgatatgtggatgga

SEQ ID NO: 50 - RNA, 27 nt, synthetic construct
  misc_feature 1..27: note = Description of Artificial Sequence: Synthetic oligonucleotide
  source 1..27: mol_type = other RNA
tccatccacatatcgcacgcctctgaa

SEQ ID NO: 51 - RNA, 25 nt, synthetic construct
  misc_feature 1..25: note = Description of Artificial Sequence: Synthetic oligonucleotide
  source 1..25: mol_type = other RNA
gcgatatgtggatggaggagtgagt

SEQ ID NO: 52 - RNA, 27 nt, synthetic construct
  misc_feature 1..27: note = Description of Artificial Sequence: Synthetic oligonucleotide
  source 1..27: mol_type = other RNA
actcactcctccatccacatatcgcac

SEQ ID NO: 53 - RNA, 25 nt, synthetic construct
  misc_feature 1..25: note = Description of Artificial Sequence: Synthetic oligonucleotide
  source 1..25: mol_type = other RNA
gatggaggagtgagtgacaacgtac

SEQ ID NO: 54 - RNA, 27 nt, synthetic construct
  misc_feature 1..27: note = Description of Artificial Sequence: Synthetic oligonucleotide
  source 1..27: mol_type = other RNA
gtacgttgtcactcactcctccatcca

SEQ ID NO: 55 - RNA, 25 nt, synthetic construct
  misc_feature 1..25: note = Description of Artificial Sequence: Synthetic oligonucleotide
  source 1..25: mol_type = other RNA
gaggagtgagtgacaacgtaccctt

SEQ ID NO: 56 - RNA, 27 nt, synthetic construct
  misc_feature 1..27: note = Description of Artificial Sequence: Synthetic oligonucleotide
  source 1..27: mol_type = other RNA
aagggtacgttgtcactcactcctcca

SEQ ID NO: 57 - RNA, 25 nt, synthetic construct
  misc_feature 1..25: note = Description of Artificial Sequence: Synthetic oligonucleotide
  source 1..25: mol_type = other RNA
gagtgagtgacaacgtacccttcat

SEQ ID NO: 58 - RNA, 27 nt, synthetic construct
  misc_feature 1..27: note = Description of Artificial Sequence: Synthetic oligonucleotide
  source 1..27: mol_type = other RNA
atgaagggtacgttgtcactcactcct

SEQ ID NO: 59 - RNA, 25 nt, synthetic construct
  misc_feature 1..25: note = Description of Artificial Sequence: Synthetic oligonucleotide
  source 1..25: mol_type = other RNA
agtgagtgacaacgtacccttcatt

SEQ ID NO: 60 - RNA, 27 nt, synthetic construct
  misc_feature 1..27: note = Description of Artificial Sequence: Synthetic oligonucleotide
  source 1..27: mol_type = other RNA
aatgaagggtacgttgtcactcactcc

SEQ ID NO: 61 - RNA, 25 nt, synthetic construct
  misc_feature 1..25: note = Description of Artificial Sequence: Synthetic oligonucleotide
  source 1..25: mol_type = other RNA
gtgagtgacaacgtacccttcattg

SEQ ID NO: 62 - RNA, 27 nt, synthetic construct
  misc_feature 1..27: note = Description of Artificial Sequence: Synthetic oligonucleotide
  source 1..27: mol_type = other RNA
caatgaagggtacgttgtcactcactc

SEQ ID NO: 63 - RNA, 25 nt, synthetic construct
  misc_feature 1..25: note = Description of Artificial Sequence: Synthetic oligonucleotide
  source 1..25: mol_type = other RNA
tgagtgacaacgtacccttcattga

SEQ ID NO: 64 - RNA, 27 nt, synthetic construct
  misc_feature 1..27: note = Description of Artificial Sequence: Synthetic oligonucleotide
  source 1..27: mol_type = other RNA
tcaatgaagggtacgttgtcactcact

SEQ ID NO: 65 - RNA, 25 nt, synthetic construct
  misc_feature 1..25: note = Description of Artificial Sequence: Synthetic oligonucleotide
  source 1..25: mol_type = other RNA
gagtgacaacgtacccttcattgat

SEQ ID NO: 66 - RNA, 27 nt, synthetic construct
  misc_feature 1..27: note = Description of Artificial Sequence: Synthetic oligonucleotide
  source 1..27: mol_type = other RNA
atcaatgaagggtacgttgtcactcac

SEQ ID NO: 67 - RNA, 25 nt, synthetic construct
  misc_feature 1..25: note = Description of Artificial Sequence: Synthetic oligonucleotide
  source 1..25: mol_type = other RNA
agtgacaacgtacccttcattgatg

SEQ ID NO: 68 - RNA, 27 nt, synthetic construct
  misc_feature 1..27: note = Description of Artificial Sequence: Synthetic oligonucleotide
  source 1..27: mol_type = other RNA
catcaatgaagggtacgttgtcactca

SEQ ID NO: 69 - RNA, 25 nt, synthetic construct
  misc_feature 1..25: note = Description of Artificial Sequence: Synthetic oligonucleotide
  source 1..25: mol_type = other RNA
gtgacaacgtacccttcattgatgc

SEQ ID NO: 70 - RNA, 27 nt, synthetic construct
  misc_feature 1..27: note = Description of Artificial Sequence: Synthetic oligonucleotide
  source 1..27: mol_type = other RNA
gcatcaatgaagggtacgttgtcactc

SEQ ID NO: 71 - RNA, 25 nt, synthetic construct
  misc_feature 1..25: note = Description of Artificial Sequence: Synthetic oligonucleotide
  source 1..25: mol_type = other RNA
tgacaacgtacccttcattgatgcc

SEQ ID NO: 72 - RNA, 27 nt, synthetic construct
  misc_feature 1..27: note = Description of Artificial Sequence: Synthetic oligonucleotide
  source 1..27: mol_type = other RNA
ggcatcaatgaagggtacgttgtcact

SEQ ID NO: 73 - RNA, 25 nt, synthetic construct
  misc_feature 1..25: note = Description of Artificial Sequence: Synthetic oligonucleotide
  source 1..25: mol_type = other RNA
gacaacgtacccttcattgatgcca

SEQ ID NO: 74 - RNA, 27 nt, synthetic construct
  misc_feature 1..27: note = Description of Artificial Sequence: Synthetic oligonucleotide
  source 1..27: mol_type = other RNA
tggcatcaatgaagggtacgttgtcac

SEQ ID NO: 75 - RNA, 25 nt, synthetic construct
  misc_feature 1..25: note = Description of Artificial Sequence: Synthetic oligonucleotide
  source 1..25: mol_type = other RNA
caacgtacccttcattgatgccaaa

SEQ ID NO: 76 - RNA, 27 nt, synthetic construct
  misc_feature 1..27: note = Description of Artificial Sequence: Synthetic oligonucleotide
  source 1..27: mol_type = other RNA
tttggcatcaatgaagggtacgttgtc

SEQ ID NO: 77 - RNA, 25 nt, synthetic construct
  misc_feature 1..25: note = Description of Artificial Sequence: Synthetic oligonucleotide
  source 1..25: mol_type = other RNA
aacgtacccttcattgatgccaaaa

SEQ ID NO: 78 - RNA, 27 nt, synthetic construct
  misc_feature 1..27: note = Description of Artificial Sequence: Synthetic oligonucleotide
  source 1..27: mol_type = other RNA
ttttggcatcaatgaagggtacgttgt

SEQ ID NO: 79 - RNA, 25 nt, synthetic construct
  misc_feature 1..25: note = Description of Artificial Sequence: Synthetic oligonucleotide
  source 1..25: mol_type = other RNA
acgtacccttcattgatgccaaaac

SEQ ID NO: 80 - RNA, 27 nt, synthetic construct
  misc_feature 1..27: note = Description of Artificial Sequence: Synthetic oligonucleotide
  source 1..27: mol_type = other RNA
gttttggcatcaatgaagggtacgttg

SEQ ID NO: 81 - RNA, 25 nt, synthetic construct
  misc_feature 1..25: note = Description of Artificial Sequence: Synthetic oligonucleotide
  source 1..25: mol_type = other RNA
cgtacccttcattgatgccaaaaca

SEQ ID NO: 82 - RNA, 27 nt, synthetic construct
  misc_feature 1..27: note = Description of Artificial Sequence: Synthetic oligonucleotide
  source 1..27: mol_type = other RNA
tgttttggcatcaatgaagggtacgtt

SEQ ID NO: 83 - RNA, 25 nt, synthetic construct
  misc_feature 1..25: note = Description of Artificial Sequence: Synthetic oligonucleotide
  source 1..25: mol_type = other RNA
tacccttcattgatgccaaaacaac

SEQ ID NO: 84 - RNA, 27 nt, synthetic construct
  misc_feature 1..27: note = Description of Artificial Sequence: Synthetic oligonucleotide
  source 1..27: mol_type = other RNA
gttgttttggcatcaatgaagggtacg

SEQ ID NO: 85 - RNA, 25 nt, synthetic construct
  misc_feature 1..25: note = Description of Artificial Sequence: Synthetic oligonucleotide
  source 1..25: mol_type = other RNA
ttgatgccaaaacaaccatcaccgt

SEQ ID NO: 86 - RNA, 27 nt, synthetic construct
  misc_feature 1..27: note = Description of Artificial Sequence: Synthetic oligonucleotide
  source 1..27: mol_type = other RNA
acggtgatggttgttttggcatcaatg

SEQ ID NO: 87 - RNA, 25 nt, synthetic construct
  misc_feature 1..25: note = Description of Artificial Sequence: Synthetic oligonucleotide
  source 1..25: mol_type = other RNA
gatgccaaaacaaccatcaccgtgt

SEQ ID NO: 88 - RNA, 27 nt, synthetic construct
  misc_feature 1..27: note = Description of Artificial Sequence: Synthetic oligonucleotide
  source 1..27: mol_type = other RNA
acacggtgatggttgttttggcatcaa

SEQ ID NO: 89 - RNA, 25 nt, synthetic construct
  misc_feature 1..25: note = Description of Artificial Sequence: Synthetic oligonucleotide
  source 1..25: mol_type = other RNA
atggggagtacgacatctgccctaa

SEQ ID NO: 90 - RNA, 27 nt, synthetic construct
  misc_feature 1..27: note = Description of Artificial Sequence: Synthetic oligonucleotide
  source 1..27: mol_type = other RNA
ttagggcagatgtcgtactccccatag

SEQ ID NO: 91 - RNA, 25 nt, synthetic construct
  misc_feature 1..25: note = Description of Artificial Sequence: Synthetic oligonucleotide
  source 1..25: mol_type = other RNA
gtacgacatctgccctaaagtcaag

SEQ ID NO: 92 - RNA, 27 nt, synthetic construct
  misc_feature 1..27: note = Description of Artificial Sequence: Synthetic oligonucleotide
  source 1..27: mol_type = other RNA
cttgactttagggcagatgtcgtactc

SEQ ID NO: 93 - RNA, 25 nt, synthetic construct
  misc_feature 1..25: note = Description of Artificial Sequence: Synthetic oligonucleotide
  source 1..25: mol_type = other RNA
gacatctgccctaaagtcaagtcca

SEQ ID NO: 94 - RNA, 27 nt, synthetic construct
  misc_feature 1..27: note = Description of Artificial Sequence: Synthetic oligonucleotide
  source 1..27: mol_type = other RNA
tggacttgactttagggcagatgtcgt

SEQ ID NO: 95 - RNA, 25 nt, synthetic construct
  misc_feature 1..25: note = Description of Artificial Sequence: Synthetic oligonucleotide
  source 1..25: mol_type = other RNA
acatctgccctaaagtcaagtccac

SEQ ID NO: 96 - RNA, 27 nt, synthetic construct
  misc_feature 1..27: note = Description of Artificial Sequence: Synthetic oligonucleotide
  source 1..27: mol_type = other RNA
gtggacttgactttagggcagatgtcg

SEQ ID NO: 97 - RNA, 25 nt, synthetic construct
  misc_feature 1..25: note = Description of Artificial Sequence: Synthetic oligonucleotide
  source 1..25: mol_type = other RNA
gtcaagtccacgaactttcttcatg

SEQ ID NO: 98 - RNA, 27 nt, synthetic construct
  misc_feature 1..27: note = Description of Artificial Sequence: Synthetic oligonucleotide
  source 1..27: mol_type = other RNA
catgaagaaagttcgtggacttgactt

SEQ ID NO: 99 - RNA, 25 nt, synthetic construct
  misc_feature 1..25: note = Description of Artificial Sequence: Synthetic oligonucleotide
  source 1..25: mol_type = other RNA
tcaagtccacgaactttcttcatgt

SEQ ID NO: 100 - RNA, 27 nt, synthetic construct
  misc_feature 1..27: note = Description of Artificial Sequence: Synthetic oligonucleotide
  source 1..27: mol_type = other RNA
acatgaagaaagttcgtggacttgact

SEQ ID NO: 101 - RNA, 25 nt, synthetic construct
  misc_feature 1..25: note = Description of Artificial Sequence: Synthetic oligonucleotide
  source 1..25: mol_type = other RNA
caagtccacgaactttcttcatgtg

SEQ ID NO: 102 - RNA, 27 nt, synthetic construct
  misc_feature 1..27: note = Description of Artificial Sequence: Synthetic oligonucleotide
  source 1..27: mol_type = other RNA
cacatgaagaaagttcgtggacttgac

SEQ ID NO: 103 - RNA, 25 nt, synthetic construct
  misc_feature 1..25: note = Description of Artificial Sequence: Synthetic oligonucleotide
  source 1..25: mol_type = other RNA
gtccacgaactttcttcatgtggac

SEQ ID NO: 104 - RNA, 27 nt, synthetic construct
  misc_feature 1..27: note = Description of Artificial Sequence: Synthetic oligonucleotide
  source 1..27: mol_type = other RNA
gtccacatgaagaaagttcgtggactt

SEQ ID NO: 105 - RNA, 25 nt, synthetic construct
  misc_feature 1..25: note = Description of Artificial Sequence: Synthetic oligonucleotide
  source 1..25: mol_type = other RNA
ccacgaactttcttcatgtggacat

SEQ ID NO: 106 - RNA, 27 nt, synthetic construct
  misc_feature 1..27: note = Description of Artificial Sequence: Synthetic oligonucleotide
  source 1..27: mol_type = other RNA
atgtccacatgaagaaagttcgtggac

SEQ ID NO: 107 - RNA, 25 nt, synthetic construct
  misc_feature 1..25: note = Description of Artificial Sequence: Synthetic oligonucleotide
  source 1..25: mol_type = other RNA
cacgaactttcttcatgtggacatc

SEQ ID NO: 108 - RNA, 27 nt, synthetic construct
  misc_feature 1..27: note = Description of Artificial Sequence: Synthetic oligonucleotide
  source 1..27: mol_type = other RNA
gatgtccacatgaagaaagttcgtgga

SEQ ID NO: 109 - RNA, 25 nt, synthetic construct
  misc_feature 1..25: note = Description of Artificial Sequence: Synthetic oligonucleotide
  source 1..25: mol_type = other RNA
acgaactttcttcatgtggacatca

SEQ ID NO: 110 - RNA, 27 nt, synthetic construct
  misc_feature 1..27: note = Description of Artificial Sequence: Synthetic oligonucleotide
  source 1..27: mol_type = other RNA
tgatgtccacatgaagaaagttcgtgg

SEQ ID NO: 111 - RNA, 25 nt, synthetic construct
  misc_feature 1..25: note = Description of Artificial Sequence: Synthetic oligonucleotide
  source 1..25: mol_type = other RNA
cgaactttcttcatgtggacatcac

SEQ ID NO: 112 - RNA, 27 nt, synthetic construct
  misc_feature 1..27: note = Description of Artificial Sequence: Synthetic oligonucleotide
  source 1..27: mol_type = other RNA
gtgatgtccacatgaagaaagttcgtg

SEQ ID NO: 113 - RNA, 25 nt, synthetic construct
  misc_feature 1..25: note = Description of Artificial Sequence: Synthetic oligonucleotide
  source 1..25: mol_type = other RNA
gaactttcttcatgtggacatcacc

SEQ ID NO: 114 - RNA, 27 nt, synthetic construct
  misc_feature 1..27: note = Description of Artificial Sequence: Synthetic oligonucleotide
  source 1..27: mol_type = other RNA
ggtgatgtccacatgaagaaagttcgt

SEQ ID NO: 115 - RNA, 25 nt, synthetic construct
  misc_feature 1..25: note = Description of Artificial Sequence: Synthetic oligonucleotide
  source 1..25: mol_type = other RNA
aactttcttcatgtggacatcacca

SEQ ID NO: 116 - RNA, 27 nt, synthetic construct
  misc_feature 1..27: note = Description of Artificial Sequence: Synthetic oligonucleotide
  source 1..27: mol_type = other RNA
tggtgatgtccacatgaagaaagttcg

SEQ ID NO: 117 - RNA, 25 nt, synthetic construct
  misc_feature 1..25: note = Description of Artificial Sequence: Synthetic oligonucleotide
  source 1..25: mol_type = other RNA
actttcttcatgtggacatcaccaa

SEQ ID NO: 118 - RNA, 27 nt, synthetic construct
  misc_feature 1..27: note = Description of Artificial Sequence: Synthetic oligonucleotide
  source 1..27: mol_type = other RNA
ttggtgatgtccacatgaagaaagttc

SEQ ID NO: 119 - RNA, 25 nt, synthetic construct
  misc_feature 1..25: note = Description of Artificial Sequence: Synthetic oligonucleotide
  source 1..25: mol_type = other RNA
ctttcttcatgtggacatcaccaag

SEQ ID NO: 120 - RNA, 27 nt, synthetic construct
  misc_feature 1..27: note = Description of Artificial Sequence: Synthetic oligonucleotide
  source 1..27: mol_type = other RNA
cttggtgatgtccacatgaagaaagtt

SEQ ID NO: 121 - RNA, 25 nt, synthetic construct
  misc_feature 1..25: note = Description of Artificial Sequence: Synthetic oligonucleotide
  source 1..25: mol_type = other RNA
tttcttcatgtggacatcaccaagc

SEQ ID NO: 122 - RNA, 27 nt, synthetic construct
  misc_feature 1..27: note = Description of Artificial Sequence: Synthetic oligonucleotide
  source 1..27: mol_type = other RNA
gcttggtgatgtccacatgaagaaagt

SEQ ID NO: 123 - RNA, 25 nt, synthetic construct
  misc_feature 1..25: note = Description of Artificial Sequence: Synthetic oligonucleotide
  source 1..25: mol_type = other RNA
ttcttcatgtggacatcaccaagct

SEQ ID NO: 124 - RNA, 27 nt, synthetic construct
  misc_feature 1..27: note = Description of Artificial Sequence: Synthetic oligonucleotide
  source 1..27: mol_type = other RNA
agcttggtgatgtccacatgaagaaag

SEQ ID NO: 125 - RNA, 25 nt, synthetic construct
  misc_feature 1..25: note = Description of Artificial Sequence: Synthetic oligonucleotide
  source 1..25: mol_type = other RNA
cttcatgtggacatcaccaagctca

SEQ ID NO: 126 - RNA, 27 nt, synthetic construct
  misc_feature 1..27: note = Description of Artificial Sequence: Synthetic oligonucleotide
  source 1..27: mol_type = other RNA
tgagcttggtgatgtccacatgaagaa

SEQ ID NO: 127 - RNA, 25 nt, synthetic construct
  misc_feature 1..25: note = Description of Artificial Sequence: Synthetic oligonucleotide
  source 1..25: mol_type = other RNA
ttcatgtggacatcaccaagctcag

SEQ ID NO: 128 - RNA, 27 nt, synthetic construct
  misc_feature 1..27: note = Description of Artificial Sequence: Synthetic oligonucleotide
  source 1..27: mol_type = other RNA
ctgagcttggtgatgtccacatgaaga

SEQ ID NO: 129 - RNA, 25 nt, synthetic construct
  misc_feature 1..25: note = Description of Artificial Sequence: Synthetic oligonucleotide
  source 1..25: mol_type = other RNA
tcatgtggacatcaccaagctcagt

SEQ ID NO: 130 - RNA, 27 nt, synthetic construct
  misc_feature 1..27: note = Description of Artificial Sequence: Synthetic oligonucleotide
  source 1..27: mol_type = other RNA
actgagcttggtgatgtccacatgaag

SEQ ID NO: 131 - RNA, 25 nt, synthetic construct
  misc_feature 1..25: note = Description of Artificial Sequence: Synthetic oligonucleotide
  source 1..25: mol_type = other RNA
catgtggacatcaccaagctcagtc

SEQ ID NO: 132 - RNA, 27 nt, synthetic construct
  misc_feature 1..27: note = Description of Artificial Sequence: Synthetic oligonucleotide
  source 1..27: mol_type = other RNA
gactgagcttggtgatgtccacatgaa

SEQ ID NO: 133 - RNA, 25 nt, synthetic construct
  misc_feature 1..25: note = Description of Artificial Sequence: Synthetic oligonucleotide
  source 1..25: mol_type = other RNA
atgtggacatcaccaagctcagtct

SEQ ID NO: 134 - RNA, 27 nt, synthetic construct
  misc_feature 1..27: note = Description of Artificial Sequence: Synthetic oligonucleotide
  source 1..27: mol_type = other RNA
agactgagcttggtgatgtccacatga

SEQ ID NO: 135 - RNA, 25 nt, synthetic construct
  misc_feature 1..25: note = Description of Artificial Sequence: Synthetic oligonucleotide
  source 1..25: mol_type = other RNA
tgtggacatcaccaagctcagtcta

SEQ ID NO: 136 - RNA, 27 nt, synthetic construct
  misc_feature 1..27: note = Description of Artificial Sequence: Synthetic oligonucleotide
  source 1..27: mol_type = other RNA
tagactgagcttggtgatgtccacatg

SEQ ID NO: 137 - RNA, 25 nt, synthetic construct
  misc_feature 1..25: note = Description of Artificial Sequence: Synthetic oligonucleotide
  source 1..25: mol_type = other RNA
gtggacatcaccaagctcagtctac

SEQ ID NO: 138 - RNA, 27 nt, synthetic construct
  misc_feature 1..27: note = Description of Artificial Sequence: Synthetic oligonucleotide
  source 1..27: mol_type = other RNA
gtagactgagcttggtgatgtccacat

SEQ ID NO: 139 - RNA, 25 nt, synthetic construct
  misc_feature 1..25: note = Description of Artificial Sequence: Synthetic oligonucleotide
  source 1..25: mol_type = other RNA
tggacatcaccaagctcagtctacg

SEQ ID NO: 140 - RNA, 27 nt, synthetic construct
  misc_feature 1..27: note = Description of Artificial Sequence: Synthetic oligonucleotide
  source 1..27: mol_type = other RNA
cgtagactgagcttggtgatgtccaca

SEQ ID NO: 141 - RNA, 25 nt, synthetic construct
  misc_feature 1..25: note = Description of Artificial Sequence: Synthetic oligonucleotide
  source 1..25: mol_type = other RNA
agcttttgtccccccggatctcaag

SEQ ID NO: 142 - RNA, 27 nt, synthetic construct
  misc_feature 1..27: note = Description of Artificial Sequence: Synthetic oligonucleotide
  source 1..27: mol_type = other RNA
cttgagatccggggggacaaaagctct

SEQ ID NO: 143 - RNA, 25 nt, synthetic construct
  misc_feature 1..25: note = Description of Artificial Sequence: Synthetic oligonucleotide
  source 1..25: mol_type = other RNA
aaggtgctgggagagatatgccttc

SEQ ID NO: 144 - RNA, 27 nt, synthetic construct
  misc_feature 1..27: note = Description of Artificial Sequence: Synthetic oligonucleotide
  source 1..27: mol_type = other RNA
gaaggcatatctctcccagcaccttga

SEQ ID NO: 145 - RNA, 25 nt, synthetic construct
  misc_feature 1..25: note = Description of Artificial Sequence: Synthetic oligonucleotide
  source 1..25: mol_type = other RNA
gggagagatatgccttcgaggatat

SEQ ID NO: 146 - RNA, 27 nt, synthetic construct
  misc_feature 1..27: note = Description of Artificial Sequence: Synthetic oligonucleotide
  source 1..27: mol_type = other RNA
atatcctcgaaggcatatctctcccag

SEQ ID NO: 147 - RNA, 25 nt, synthetic construct
  misc_feature 1..25: note = Description of Artificial Sequence: Synthetic oligonucleotide
  source 1..25: mol_type = other RNA
ggagagatatgccttcgaggatatt

SEQ ID NO: 148 - RNA, 27 nt, synthetic construct
  misc_feature 1..27: note = Description of Artificial Sequence: Synthetic oligonucleotide
  source 1..27: mol_type = other RNA
aatatcctcgaaggcatatctctccca

SEQ ID NO: 149 - RNA, 25 nt, synthetic construct
  misc_feature 1..25: note = Description of Artificial Sequence: Synthetic oligonucleotide
  source 1..25: mol_type = other RNA
agagatatgccttcgaggatatttg

SEQ ID NO: 150 - RNA, 27 nt, synthetic construct
  misc_feature 1..27: note = Description of Artificial Sequence: Synthetic oligonucleotide
  source 1..27: mol_type = other RNA
caaatatcctcgaaggcatatctctcc

SEQ ID NO: 151 - RNA, 25 nt, synthetic construct
  misc_feature 1..25: note = Description of Artificial Sequence: Synthetic oligonucleotide
  source 1..25: mol_type = other RNA
gagatatgccttcgaggatatttgg

SEQ ID NO: 152 - RNA, 27 nt, synthetic construct
  misc_feature 1..27: note = Description of Artificial Sequence: Synthetic oligonucleotide
  source 1..27: mol_type = other RNA
ccaaatatcctcgaaggcatatctctc

SEQ ID NO: 153 - RNA, 25 nt, synthetic construct
  misc_feature 1..25: note = Description of Artificial Sequence: Synthetic oligonucleotide
  source 1..25: mol_type = other RNA
agatatgccttcgaggatatttgga

SEQ ID NO: 154 - RNA, 27 nt, synthetic construct
  misc_feature 1..27: note = Description of Artificial Sequence: Synthetic oligonucleotide
  source 1..27: mol_type = other RNA
tccaaatatcctcgaaggcatatctct

SEQ ID NO: 155 - RNA, 25 nt, synthetic construct
  misc_feature 1..25: note = Description of Artificial Sequence: Synthetic oligonucleotide
  source 1..25: mol_type = other RNA
gatatgccttcgaggatatttggat

SEQ ID NO: 156 - RNA, 27 nt, synthetic construct
  misc_feature 1..27: note = Description of Artificial Sequence: Synthetic oligonucleotide
  source 1..27: mol_type = other RNA
atccaaatatcctcgaaggcatatctc

SEQ ID NO: 157 - RNA, 25 nt, synthetic construct
  misc_feature 1..25: note = Description of Artificial Sequence: Synthetic oligonucleotide
  source 1..25: mol_type = other RNA
atatgccttcgaggatatttggatg

SEQ ID NO: 158 - RNA, 27 nt, synthetic construct
  misc_feature 1..27: note = Description of Artificial Sequence: Synthetic oligonucleotide
  source 1..27: mol_type = other RNA
catccaaatatcctcgaaggcatatct

SEQ ID NO: 159 - RNA, 25 nt, synthetic construct
  misc_feature 1..25: note = Description of Artificial Sequence: Synthetic oligonucleotide
  source 1..25: mol_type = other RNA
atgccttcgaggatatttggatgca

SEQ ID NO: 160 - RNA, 27 nt, synthetic construct
  misc_feature 1..27: note = Description of Artificial Sequence: Synthetic oligonucleotide
  source 1..27: mol_type = other RNA
tgcatccaaatatcctcgaaggcatat

SEQ ID NO: 161 - RNA, 25 nt, synthetic construct
  misc_feature 1..25: note = Description of Artificial Sequence: Synthetic oligonucleotide
  source 1..25: mol_type = other RNA
tgccttcgaggatatttggatgcat

SEQ ID NO: 162 - RNA, 27 nt, synthetic construct
  misc_feature 1..27: note = Description of Artificial Sequence: Synthetic oligonucleotide
  source 1..27: mol_type = other RNA
atgcatccaaatatcctcgaaggcata

SEQ ID NO: 163 - RNA, 25 nt, synthetic construct
  misc_feature 1..25: note = Description of Artificial Sequence: Synthetic oligonucleotide
  source 1..25: mol_type = other RNA
gccttcgaggatatttggatgcatt

SEQ ID NO: 164 - RNA, 27 nt, synthetic construct
  misc_feature 1..27: note = Description of Artificial Sequence: Synthetic oligonucleotide
  source 1..27: mol_type = other RNA
aatgcatccaaatatcctcgaaggcat

SEQ ID NO: 165 - RNA, 25 nt, synthetic construct
  misc_feature 1..25: note = Description of Artificial Sequence: Synthetic oligonucleotide
  source 1..25: mol_type = other RNA
tcaggttcttggaagagaagggcat

SEQ ID NO: 166 - RNA, 27 nt, synthetic construct
  misc_feature 1..27: note = Description of Artificial Sequence: Synthetic oligonucleotide
  source 1..27: mol_type = other RNA
atgcccttctcttccaagaacctgaat

SEQ ID NO: 167 - RNA, 25 nt, synthetic construct
  misc_feature 1..25: note = Description of Artificial Sequence: Synthetic oligonucleotide
  source 1..25: mol_type = other RNA
caggttcttggaagagaagggcatc

SEQ ID NO: 168 - RNA, 27 nt, synthetic construct
  misc_feature 1..27: note = Description of Artificial Sequence: Synthetic oligonucleotide
  source 1..27: mol_type = other RNA
gatgcccttctcttccaagaacctgaa

SEQ ID NO: 169 - RNA, 25 nt, synthetic construct
  misc_feature 1..25: note = Description of Artificial Sequence: Synthetic oligonucleotide
  source 1..25: mol_type = other RNA
aggttcttggaagagaagggcatct

SEQ ID NO: 170 - RNA, 27 nt, synthetic construct
  misc_feature 1..27: note = Description of Artificial Sequence: Synthetic oligonucleotide
  source 1..27: mol_type = other RNA
agatgcccttctcttccaagaacctga

SEQ ID NO: 171 - RNA, 25 nt, synthetic construct
  misc_feature 1..25: note = Description of Artificial Sequence: Synthetic oligonucleotide
  source 1..25: mol_type = other RNA
ggttcttggaagagaagggcatctg

SEQ ID NO: 172 - RNA, 27 nt, synthetic construct
  misc_feature 1..27: note = Description of Artificial Sequence: Synthetic oligonucleotide
  source 1..27: mol_type = other RNA
cagatgcccttctcttccaagaacctg

SEQ ID NO: 173 - RNA, 25 nt, synthetic construct
  misc_feature 1..25: note = Description of Artificial Sequence: Synthetic oligonucleotide
  source 1..25: mol_type = other RNA
tggaagagaagggcatctgcaacag

SEQ ID NO: 174 - RNA, 27 nt, synthetic construct
  misc_feature 1..27: note = Description of Artificial Sequence: Synthetic oligonucleotide
  source 1..27: mol_type = other RNA
ctgttgcagatgcccttctcttccaag

SEQ ID NO: 175 - RNA, 25 nt, synthetic construct
  misc_feature 1..25: note = Description of Artificial Sequence: Synthetic oligonucleotide
  source 1..25: mol_type = other RNA
tgaagtcatcctcagaagggatgga

SEQ ID NO: 176 - RNA, 27 nt, synthetic construct
  misc_feature 1..27: note = Description of Artificial Sequence: Synthetic oligonucleotide
  source 1..27: mol_type = other RNA
tccatcccttctgaggatgacttcagg

SEQ ID NO: 177 - RNA, 25 nt, synthetic construct
  misc_feature 1..25: note = Description of Artificial Sequence: Synthetic oligonucleotide
  source 1..25: mol_type = other RNA
gaagtcatcctcagaagggatggat

SEQ ID NO: 178 - RNA, 27 nt, synthetic construct
  misc_feature 1..27: note = Description of Artificial Sequence: Synthetic oligonucleotide
  source 1..27: mol_type = other RNA
atccatcccttctgaggatgacttcag

SEQ ID NO: 179 - RNA, 25 nt, synthetic construct
  misc_feature 1..25: note = Description of Artificial Sequence: Synthetic oligonucleotide
  source 1..25: mol_type = other RNA
aagtcatcctcagaagggatggatc

SEQ ID NO: 180 - RNA, 27 nt, synthetic construct
  misc_feature 1..27: note = Description of Artificial Sequence: Synthetic oligonucleotide
  source 1..27: mol_type = other RNA
gatccatcccttctgaggatgacttca

SEQ ID NO: 181 - RNA, 25 nt, synthetic construct
  misc_feature 1..25: note = Description of Artificial Sequence: Synthetic oligonucleotide
  source 1..25: mol_type = other RNA
gtcatcctcagaagggatggatcct

SEQ ID NO: 182 - RNA, 27 nt, synthetic construct
  misc_feature 1..27: note = Description of Artificial Sequence: Synthetic oligonucleotide
  source 1..27: mol_type = other RNA
aggatccatcccttctgaggatgactt

SEQ ID NO: 183 - RNA, 25 nt, synthetic construct
  misc_feature 1..25: note = Description of Artificial Sequence: Synthetic oligonucleotide
  source 1..25: mol_type = other RNA
catcctcagaagggatggatcctga

SEQ ID NO: 184 - RNA, 27 nt, synthetic construct
  misc_feature 1..27: note = Description of Artificial Sequence: Synthetic oligonucleotide
  source 1..27: mol_type = other RNA
tcaggatccatcccttctgaggatgac

SEQ ID NO: 185 - RNA, 25 nt, synthetic construct
  misc_feature 1..25: note = Description of Artificial Sequence: Synthetic oligonucleotide
  source 1..25: mol_type = other RNA
atcctcagaagggatggatcctgag

SEQ ID NO: 186 - RNA, 27 nt, synthetic construct
  misc_feature 1..27: note = Description of Artificial Sequence: Synthetic oligonucleotide
  source 1..27: mol_type = other RNA
ctcaggatccatcccttctgaggatga

SEQ ID NO: 187 - RNA, 25 nt, synthetic construct
  misc_feature 1..25: note = Description of Artificial Sequence: Synthetic oligonucleotide
  source 1..25: mol_type = other RNA
ctagaccacctgcgtctcagcatcc

SEQ ID NO: 188 - RNA, 27 nt, synthetic construct
  misc_feature 1..27: note = Description of Artificial Sequence: Synthetic oligonucleotide
  source 1..27: mol_type = other RNA
ggatgctgagacgcaggtggtctagca

SEQ ID NO: 189 - RNA, 25 nt, synthetic construct
  misc_feature 1..25: note = Description of Artificial Sequence: Synthetic oligonucleotide
  source 1..25: mol_type = other RNA
agtgaagaaatgaaagacaaaggtg

SEQ ID NO: 190 - RNA, 27 nt, synthetic construct
  misc_feature 1..27: note = Description of Artificial Sequence: Synthetic oligonucleotide
  source 1..27: mol_type = other RNA
cacctttgtctttcatttcttcactca

SEQ ID NO: 191 - RNA, 25 nt, synthetic construct
  misc_feature 1..25: note = Description of Artificial Sequence: Synthetic oligonucleotide
  source 1..25: mol_type = other RNA
gtgaagaaatgaaagacaaaggtgg

SEQ ID NO: 192 - RNA, 27 nt, synthetic construct
  misc_feature 1..27: note = Description of Artificial Sequence: Synthetic oligonucleotide
  source 1..27: mol_type = other RNA
ccacctttgtctttcatttcttcactc

SEQ ID NO: 193 - RNA, 25 nt, synthetic construct
  misc_feature 1..25: note = Description of Artificial Sequence: Synthetic oligonucleotide
  source 1..25: mol_type = other RNA
tgaagaaatgaaagacaaaggtgga

SEQ ID NO: 194 - RNA, 27 nt, synthetic construct
  misc_feature 1..27: note = Description of Artificial Sequence: Synthetic oligonucleotide
  source 1..27: mol_type = other RNA
tccacctttgtctttcatttcttcact

SEQ ID NO: 195 - RNA, 25 nt, synthetic construct
  misc_feature 1..25: note = Description of Artificial Sequence: Synthetic oligonucleotide
  source 1..25: mol_type = other RNA
gaagaaatgaaagacaaaggtggat

SEQ ID NO: 196 - RNA, 27 nt, synthetic construct
  misc_feature 1..27: note = Description of Artificial Sequence: Synthetic oligonucleotide
  source 1..27: mol_type = other RNA
atccacctttgtctttcatttcttcac

SEQ ID NO: 197 - RNA, 25 nt, synthetic construct
  misc_feature 1..25: note = Description of Artificial Sequence: Synthetic oligonucleotide
  source 1..25: mol_type = other RNA
aagaaatgaaagacaaaggtggata

SEQ ID NO: 198 - RNA, 27 nt, synthetic construct
  misc_feature 1..27: note = Description of Artificial Sequence: Synthetic oligonucleotide
  source 1..27: mol_type = other RNA
tatccacctttgtctttcatttcttca

SEQ ID NO: 199 - RNA, 25 nt, synthetic construct
  misc_feature 1..25: note = Description of Artificial Sequence: Synthetic oligonucleotide
  source 1..25: mol_type = other RNA
agaaatgaaagacaaaggtggatac

SEQ ID NO: 200 - RNA, 27 nt, synthetic construct
  misc_feature 1..27: note = Description of Artificial Sequence: Synthetic oligonucleotide
  source 1..27: mol_type = other RNA
gtatccacctttgtctttcatttcttc

SEQ ID NO: 201 - RNA, 25 nt, synthetic construct
  misc_feature 1..25: note = Description of Artificial Sequence: Synthetic oligonucleotide
  source 1..25: mol_type = other RNA
gaaatgaaagacaaaggtggataca

SEQ ID NO: 202 - RNA, 27 nt, synthetic construct
  misc_feature 1..27: note = Description of Artificial Sequence: Synthetic oligonucleotide
  source 1..27: mol_type = other RNA
tgtatccacctttgtctttcatttctt

SEQ ID NO: 203 - RNA, 25 nt, synthetic construct
  misc_feature 1..25: note = Description of Artificial Sequence: Synthetic oligonucleotide
  source 1..25: mol_type = other RNA
aaatgaaagacaaaggtggatacat

SEQ ID NO: 204 - RNA, 27 nt, synthetic construct
  misc_feature 1..27: note = Description of Artificial Sequence: Synthetic oligonucleotide
  source 1..27: mol_type = other RNA
atgtatccacctttgtctttcatttct

SEQ ID NO: 205 - RNA, 25 nt, synthetic construct
  misc_feature 1..25: note = Description of Artificial Sequence: Synthetic oligonucleotide
  source 1..25: mol_type = other RNA
aatgaaagacaaaggtggatacatg

SEQ ID NO: 206 - RNA, 27 nt, synthetic construct
  misc_feature 1..27: note = Description of Artificial Sequence: Synthetic oligonucleotide
  source 1..27: mol_type = other RNA
catgtatccacctttgtctttcatttc

SEQ ID NO: 207 - RNA, 25 nt, synthetic construct
  misc_feature 1..25: note = Description of Artificial Sequence: Synthetic oligonucleotide
  source 1..25: mol_type = other RNA
atgaaagacaaaggtggatacatga

SEQ ID NO: 208 - RNA, 27 nt, synthetic construct
  misc_feature 1..27: note = Description of Artificial Sequence: Synthetic oligonucleotide
  source 1..27: mol_type = other RNA
tcatgtatccacctttgtctttcattt

SEQ ID NO: 209 - RNA, 25 nt, synthetic construct
  misc_feature 1..25: note = Description of Artificial Sequence: Synthetic oligonucleotide
  source 1..25: mol_type = other RNA
tgaaagacaaaggtggatacatgag

SEQ ID NO: 210 - RNA, 27 nt, synthetic construct
  misc_feature 1..27: note = Description of Artificial Sequence: Synthetic oligonucleotide
  source 1..27: mol_type = other RNA
ctcatgtatccacctttgtctttcatt

SEQ ID NO: 211 - RNA, 25 nt, synthetic construct
  misc_feature 1..25: note = Description of Artificial Sequence: Synthetic oligonucleotide
  source 1..25: mol_type = other RNA
gaaagacaaaggtggatacatgagc

SEQ ID NO: 212 - RNA, 27 nt, synthetic construct
  misc_feature 1..27: note = Description of Artificial Sequence: Synthetic oligonucleotide
  source 1..27: mol_type = other RNA
gctcatgtatccacctttgtctttcat

SEQ ID NO: 213 - RNA, 25 nt, synthetic construct
  misc_feature 1..25: note = Description of Artificial Sequence: Synthetic oligonucleotide
  source 1..25: mol_type = other RNA
aagacaaaggtggatacatgagcaa

SEQ ID NO: 214 - RNA, 27 nt, synthetic construct
  misc_feature 1..27: note = Description of Artificial Sequence: Synthetic oligonucleotide
  source 1..27: mol_type = other RNA
ttgctcatgtatccacctttgtctttc

SEQ ID NO: 215 - RNA, 25 nt, synthetic construct
  misc_feature 1..25: note = Description of Artificial Sequence: Synthetic oligonucleotide
  source 1..25: mol_type = other RNA
agacaaaggtggatacatgagcaag

SEQ ID NO: 216 - RNA, 27 nt, synthetic construct
  misc_feature 1..27: note = Description of Artificial Sequence: Synthetic oligonucleotide
  source 1..27: mol_type = other RNA
cttgctcatgtatccacctttgtcttt

SEQ ID NO: 217 - RNA, 25 nt, synthetic construct
  misc_feature 1..25: note = Description of Artificial Sequence: Synthetic oligonucleotide
  source 1..25: mol_type = other RNA
gacaaaggtggatacatgagcaaga

SEQ ID NO: 218 - RNA, 27 nt, synthetic construct
  misc_feature 1..27: note = Description of Artificial Sequence: Synthetic oligonucleotide
  source 1..27: mol_type = other RNA
tcttgctcatgtatccacctttgtctt

SEQ ID NO: 219 - RNA, 25 nt, synthetic construct
  misc_feature 1..25: note = Description of Artificial Sequence: Synthetic oligonucleotide
  source 1..25: mol_type = other RNA
acaaaggtggatacatgagcaagat

SEQ ID NO: 220 - RNA, 27 nt, synthetic construct
  misc_feature 1..27: note = Description of Artificial Sequence: Synthetic oligonucleotide
  source 1..27: mol_type = other RNA
atcttgctcatgtatccacctttgtct

SEQ ID NO: 221 - RNA, 25 nt, synthetic construct
  misc_feature 1..25: note = Description of Artificial Sequence: Synthetic oligonucleotide
  source 1..25: mol_type = other RNA
aaggtggatacatgagcaagatttg

SEQ ID NO: 222 - RNA, 27 nt, synthetic construct
  misc_feature 1..27: note = Description of Artificial Sequence: Synthetic oligonucleotide
  source 1..27: mol_type = other RNA
caaatcttgctcatgtatccacctttg

SEQ ID NO: 223 - RNA, 25 nt, synthetic construct
  misc_feature 1..25: note = Description of Artificial Sequence: Synthetic oligonucleotide
  source 1..25: mol_type = other RNA
aggtggatacatgagcaagatttgc

SEQ ID NO: 224 - RNA, 27 nt, synthetic construct
  misc_feature 1..27: note = Description of Artificial Sequence: Synthetic oligonucleotide
  source 1..27: mol_type = other RNA
gcaaatcttgctcatgtatccaccttt

SEQ ID NO: 225 - RNA, 25 nt, synthetic construct
  misc_feature 1..25: note = Description of Artificial Sequence: Synthetic oligonucleotide
  source 1..25: mol_type = other RNA
tggatacatgagcaagatttgcaac

SEQ ID NO: 226 - RNA, 27 nt, synthetic construct
  misc_feature 1..27: note = Description of Artificial Sequence: Synthetic oligonucleotide
  source 1..27: mol_type = other RNA
gttgcaaatcttgctcatgtatccacc

SEQ ID NO: 227 - RNA, 25 nt, synthetic construct
  misc_feature 1..25: note = Description of Artificial Sequence: Synthetic oligonucleotide
  source 1..25: mol_type = other RNA
ggatacatgagcaagatttgcaact

SEQ ID NO: 228 - RNA, 27 nt, synthetic construct
  misc_feature 1..27: note = Description of Artificial Sequence: Synthetic oligonucleotide
  source 1..27: mol_type = other RNA
agttgcaaatcttgctcatgtatccac

SEQ ID NO: 229 - RNA, 25 nt, synthetic construct
  misc_feature 1..25: note = Description of Artificial Sequence: Synthetic oligonucleotide
  source 1..25: mol_type = other RNA
gatacatgagcaagatttgcaactt

SEQ ID NO: 230 - RNA, 27 nt, synthetic construct
  misc_feature 1..27: note = Description of Artificial Sequence: Synthetic oligonucleotide
  source 1..27: mol_type = other RNA
aagttgcaaatcttgctcatgtatcca

SEQ ID NO: 231 - RNA, 25 nt, synthetic construct
  misc_feature 1..25: note = Description of Artificial Sequence: Synthetic oligonucleotide
  source 1..25: mol_type = other RNA
atacatgagcaagatttgcaacttg

SEQ ID NO: 232 - RNA, 27 nt, synthetic construct
  misc_feature 1..27: note = Description of Artificial Sequence: Synthetic oligonucleotide
  source 1..27: mol_type = other RNA
caagttgcaaatcttgctcatgtatcc

SEQ ID NO: 233 - RNA, 25 nt, synthetic construct
  misc_feature 1..25: note = Description of Artificial Sequence: Synthetic oligonucleotide
  source 1..25: mol_type = other RNA
tacatgagcaagatttgcaacttgc

SEQ ID NO: 234 - RNA, 27 nt, synthetic construct
  misc_feature 1..27: note = Description of Artificial Sequence: Synthetic oligonucleotide
  source 1..27: mol_type = other RNA
gcaagttgcaaatcttgctcatgtatc

SEQ ID NO: 235 - RNA, 25 nt, synthetic construct
  misc_feature 1..25: note = Description of Artificial Sequence: Synthetic oligonucleotide
  source 1..25: mol_type = other RNA
acatgagcaagatttgcaacttgct

SEQ ID NO: 236 - RNA, 27 nt, synthetic construct
  misc_feature 1..27: note = Description of Artificial Sequence: Synthetic oligonucleotide
  source 1..27: mol_type = other RNA
agcaagttgcaaatcttgctcatgtat

SEQ ID NO: 237 - RNA, 25 nt, synthetic construct
  misc_feature 1..25: note = Description of Artificial Sequence: Synthetic oligonucleotide
  source 1..25: mol_type = other RNA
catgagcaagatttgcaacttgcta

SEQ ID NO: 238 - RNA, 27 nt, synthetic construct
  misc_feature 1..27: note = Description of Artificial Sequence: Synthetic oligonucleotide
  source 1..27: mol_type = other RNA
tagcaagttgcaaatcttgctcatgta

SEQ ID NO: 239 - RNA, 25 nt, synthetic construct
  misc_feature 1..25: note = Description of Artificial Sequence: Synthetic oligonucleotide
  source 1..25: mol_type = other RNA
atgagcaagatttgcaacttgctac

SEQ ID NO: 240 - RNA, 27 nt, synthetic construct
  misc_feature 1..27: note = Description of Artificial Sequence: Synthetic oligonucleotide
  source 1..27: mol_type = other RNA
gtagcaagttgcaaatcttgctcatgt

SEQ ID NO: 241 - RNA, 25 nt, synthetic construct
  misc_feature 1..25: note = Description of Artificial Sequence: Synthetic oligonucleotide
  source 1..25: mol_type = other RNA
tgagcaagatttgcaacttgctacc

SEQ ID NO: 242 - RNA, 27 nt, synthetic construct
  misc_feature 1..27: note = Description of Artificial Sequence: Synthetic oligonucleotide
  source 1..27: mol_type = other RNA
ggtagcaagttgcaaatcttgctcatg

SEQ ID NO: 243 - RNA, 25 nt, synthetic construct
  misc_feature 1..25: note = Description of Artificial Sequence: Synthetic oligonucleotide
  source 1..25: mol_type = other RNA
gagcaagatttgcaacttgctaccc

SEQ ID NO: 244 - RNA, 27 nt, synthetic construct
  misc_feature 1..27: note = Description of Artificial Sequence: Synthetic oligonucleotide
  source 1..27: mol_type = other RNA
gggtagcaagttgcaaatcttgctcat

SEQ ID NO: 245 - RNA, 25 nt, synthetic construct
  misc_feature 1..25: note = Description of Artificial Sequence: Synthetic oligonucleotide
  source 1..25: mol_type = other RNA
agcaagatttgcaacttgctaccca

SEQ ID NO: 246 - RNA, 27 nt, synthetic construct
  misc_feature 1..27: note = Description of Artificial Sequence: Synthetic oligonucleotide
  source 1..27: mol_type = other RNA
tgggtagcaagttgcaaatcttgctca

SEQ ID NO: 247 - RNA, 25 nt, synthetic construct
  misc_feature 1..25: note = Description of Artificial Sequence: Synthetic oligonucleotide
  source 1..25: mol_type = other RNA
gcaagatttgcaacttgctacccat

SEQ ID NO: 248 - RNA, 27 nt, synthetic construct
  misc_feature 1..27: note = Description of Artificial Sequence: Synthetic oligonucleotide
  source 1..27: mol_type = other RNA
atgggtagcaagttgcaaatcttgctc

SEQ ID NO: 249 - RNA, 25 nt, synthetic construct
  misc_feature 1..25: note = Description of Artificial Sequence: Synthetic oligonucleotide
  source 1..25: mol_type = other RNA
caagatttgcaacttgctacccatt

SEQ ID NO: 250 - RNA, 27 nt, synthetic construct
  misc_feature 1..27: note = Description of Artificial Sequence: Synthetic oligonucleotide
  source 1..27: mol_type = other RNA
aatgggtagcaagttgcaaatcttgct

SEQ ID NO: 251 - RNA, 25 nt, synthetic construct
  misc_feature 1..25: note = Description of Artificial Sequence: Synthetic oligonucleotide
  source 1..25: mol_type = other RNA
aagatttgcaacttgctacccatta

SEQ ID NO: 252 - RNA, 27 nt, synthetic construct
  misc_feature 1..27: note = Description of Artificial Sequence: Synthetic oligonucleotide
  source 1..27: mol_type = other RNA
taatgggtagcaagttgcaaatcttgc

SEQ ID NO: 253 - RNA, 25 nt, synthetic construct
  misc_feature 1..25: note = Description of Artificial Sequence: Synthetic oligonucleotide
  source 1..25: mol_type = other RNA
agatttgcaacttgctacccattag

SEQ ID NO: 254 - RNA, 27 nt, synthetic construct
  misc_feature 1..27: note = Description of Artificial Sequence: Synthetic oligonucleotide
  source 1..27: mol_type = other RNA
ctaatgggtagcaagttgcaaatcttg

SEQ ID NO: 255 - RNA, 25 nt, synthetic construct
  misc_feature 1..25: note = Description of Artificial Sequence: Synthetic oligonucleotide
  source 1..25: mol_type = other RNA
gatttgcaacttgctacccattagg

SEQ ID NO: 256 - RNA, 27 nt, synthetic construct
  misc_feature 1..27: note = Description of Artificial Sequence: Synthetic oligonucleotide
  source 1..27: mol_type = other RNA
cctaatgggtagcaagttgcaaatctt

SEQ ID NO: 257 - RNA, 25 nt, synthetic construct
  misc_feature 1..25: note = Description of Artificial Sequence: Synthetic oligonucleotide
  source 1..25: mol_type = other RNA
atttgcaacttgctacccattagga

SEQ ID NO: 258 - RNA, 27 nt, synthetic construct
  misc_feature 1..27: note = Description of Artificial Sequence: Synthetic oligonucleotide
  source 1..27: mol_type = other RNA
tcctaatgggtagcaagttgcaaatct

SEQ ID NO: 259 - RNA, 25 nt, synthetic construct
  misc_feature 1..25: note = Description of Artificial Sequence: Synthetic oligonucleotide
  source 1..25: mol_type = other RNA
tttgcaacttgctacccattaggat

SEQ ID NO: 260 - RNA, 27 nt, synthetic construct
  misc_feature 1..27: note = Description of Artificial Sequence: Synthetic oligonucleotide
  source 1..27: mol_type = other RNA
atcctaatgggtagcaagttgcaaatc

SEQ ID NO: 261 - RNA, 25 nt, synthetic construct
  misc_feature 1..25: note = Description of Artificial Sequence: Synthetic oligonucleotide
  source 1..25: mol_type = other RNA
ttgcaacttgctacccattaggata

SEQ ID NO: 262 - RNA, 27 nt, synthetic construct
  misc_feature 1..27: note = Description of Artificial Sequence: Synthetic oligonucleotide
  source 1..27: mol_type = other RNA
tatcctaatgggtagcaagttgcaaat

SEQ ID NO: 263 - RNA, 25 nt, synthetic construct
  misc_feature 1..25: note = Description of Artificial Sequence: Synthetic oligonucleotide
  source 1..25: mol_type = other RNA
tgcaacttgctacccattaggataa

SEQ ID NO: 264 - RNA, 27 nt, synthetic construct
  misc_feature 1..27: note = Description of Artificial Sequence: Synthetic oligonucleotide
  source 1..27: mol_type = other RNA
ttatcctaatgggtagcaagttgcaaa

SEQ ID NO: 265 - RNA, 25 nt, synthetic construct
  misc_feature 1..25: note = Description of Artificial Sequence: Synthetic oligonucleotide
  source 1..25: mol_type = other RNA
gcaacttgctacccattaggataat

SEQ ID NO: 266 - RNA, 27 nt, synthetic construct
  misc_feature 1..27: note = Description of Artificial Sequence: Synthetic oligonucleotide
  source 1..27: mol_type = other RNA
attatcctaatgggtagcaagttgcaa

SEQ ID NO: 267 - RNA, 25 nt, synthetic construct
  misc_feature 1..25: note = Description of Artificial Sequence: Synthetic oligonucleotide
  source 1..25: mol_type = other RNA
caacttgctacccattaggataatg

SEQ ID NO: 268 - RNA, 27 nt, synthetic construct
  misc_feature 1..27: note = Description of Artificial Sequence: Synthetic oligonucleotide
  source 1..27: mol_type = other RNA
cattatcctaatgggtagcaagttgca

SEQ ID NO: 269 - RNA, 25 nt, synthetic construct
  misc_feature 1..25: note = Description of Artificial Sequence: Synthetic oligonucleotide
  source 1..25: mol_type = other RNA
cttgctacccattaggataatgtct

SEQ ID NO: 270 - RNA, 27 nt, synthetic construct
  misc_feature 1..27: note = Description of Artificial Sequence: Synthetic oligonucleotide
  source 1..27: mol_type = other RNA
agacattatcctaatgggtagcaagtt

SEQ ID NO: 271 - RNA, 25 nt, synthetic construct
  misc_feature 1..25: note = Description of Artificial Sequence: Synthetic oligonucleotide
  source 1..25: mol_type = other RNA
ttgctacccattaggataatgtctt

SEQ ID NO: 272 - RNA, 27 nt, synthetic construct
  misc_feature 1..27: note = Description of Artificial Sequence: Synthetic oligonucleotide
  source 1..27: mol_type = other RNA
aagacattatcctaatgggtagcaagt

SEQ ID NO: 273 - RNA, 25 nt, synthetic construct
  misc_feature 1..25: note = Description of Artificial Sequence: Synthetic oligonucleotide
  source 1..25: mol_type = other RNA
tgctacccattaggataatgtctta

SEQ ID NO: 274 - RNA, 27 nt, synthetic construct
  misc_feature 1..27: note = Description of Artificial Sequence: Synthetic oligonucleotide
  source 1..27: mol_type = other RNA
taagacattatcctaatgggtagcaag

SEQ ID NO: 275 - RNA, 25 nt, synthetic construct
  misc_feature 1..25: note = Description of Artificial Sequence: Synthetic oligonucleotide
  source 1..25: mol_type = other RNA
attaggataatgtcttatgtaatgc

SEQ ID NO: 276 - RNA, 27 nt, synthetic construct
  misc_feature 1..27: note = Description of Artificial Sequence: Synthetic oligonucleotide
  source 1..27: mol_type = other RNA
gcattacataagacattatcctaatgg

SEQ ID NO: 277 - RNA, 25 nt, synthetic construct
  misc_feature 1..25: note = Description of Artificial Sequence: Synthetic oligonucleotide
  source 1..25: mol_type = other RNA
ttaggataatgtcttatgtaatgct

SEQ ID NO: 278 - RNA, 27 nt, synthetic construct
  misc_feature 1..27: note = Description of Artificial Sequence: Synthetic oligonucleotide
  source 1..27: mol_type = other RNA
agcattacataagacattatcctaatg

SEQ ID NO: 279 - RNA, 25 nt, synthetic construct
  misc_feature 1..25: note = Description of Artificial Sequence: Synthetic oligonucleotide
  source 1..25: mol_type = other RNA
ctgtggaatctgccattgcgattgt

SEQ ID NO: 280 - RNA, 27 nt, synthetic construct
  misc_feature 1..27: note = Description of Artificial Sequence: Synthetic oligonucleotide
  source 1..27: mol_type = other RNA
acaatcgcaatggcagattccacaggc

SEQ ID NO: 281 - RNA, 25 nt, synthetic construct
  misc_feature 1..25: note = Description of Artificial Sequence: Synthetic oligonucleotide
  source 1..25: mol_type = other RNA
ggaatctgccattgcgattgtccag

SEQ ID NO: 282 - RNA, 27 nt, synthetic construct
  misc_feature 1..27: note = Description of Artificial Sequence: Synthetic oligonucleotide
  source 1..27: mol_type = other RNA
ctggacaatcgcaatggcagattccac

SEQ ID NO: 283 - RNA, 25 nt, synthetic construct
  misc_feature 1..25: note = Description of Artificial Sequence: Synthetic oligonucleotide
  source 1..25: mol_type = other RNA
gaatctgccattgcgattgtccaga

SEQ ID NO: 284 - RNA, 27 nt, synthetic construct
  misc_feature 1..27: note = Description of Artificial Sequence: Synthetic oligonucleotide
  source 1..27: mol_type = other RNA
tctggacaatcgcaatggcagattcca

SEQ ID NO: 285 - RNA, 25 nt, synthetic construct
  misc_feature 1..25: note = Description of Artificial Sequence: Synthetic oligonucleotide
  source 1..25: mol_type = other RNA
aatctgccattgcgattgtccagag

SEQ ID NO: 286 - RNA, 27 nt, synthetic construct
  misc_feature 1..27: note = Description of Artificial Sequence: Synthetic oligonucleotide
  source 1..27: mol_type = other RNA
ctctggacaatcgcaatggcagattcc

SEQ ID NO: 287 - RNA, 25 nt, synthetic construct
  misc_feature 1..25: note = Description of Artificial Sequence: Synthetic oligonucleotide
  source 1..25: mol_type = other RNA
atctgccattgcgattgtccagaga

SEQ ID NO: 288 - RNA, 27 nt, synthetic construct
  misc_feature 1..27: note = Description of Artificial Sequence: Synthetic oligonucleotide
  source 1..27: mol_type = other RNA
tctctggacaatcgcaatggcagattc

SEQ ID NO: 289 - RNA, 25 nt, synthetic construct
  misc_feature 1..25: note = Description of Artificial Sequence: Synthetic oligonucleotide
  source 1..25: mol_type = other RNA
ccattgcgattgtccagagactggt

SEQ ID NO: 290 - RNA, 27 nt, synthetic construct
  misc_feature 1..27: note = Description of Artificial Sequence: Synthetic oligonucleotide
  source 1..27: mol_type = other RNA
accagtctctggacaatcgcaatggca

SEQ ID NO: 291 - RNA, 25 nt, synthetic construct
  misc_feature 1..25: note = Description of Artificial Sequence: Synthetic oligonucleotide
  source 1..25: mol_type = other RNA
cattgcgattgtccagagactggtg

SEQ ID NO: 292 - RNA, 27 nt, synthetic construct
  misc_feature 1..27: note = Description of Artificial Sequence: Synthetic oligonucleotide
  source 1..27: mol_type = other RNA
caccagtctctggacaatcgcaatggc

SEQ ID NO: 293 - RNA, 25 nt, synthetic construct
  misc_feature 1..25: note = Description of Artificial Sequence: Synthetic oligonucleotide
  source 1..25: mol_type = other RNA
attgcgattgtccagagactggtga

SEQ ID NO: 294 - RNA, 27 nt, synthetic construct
  misc_feature 1..27: note = Description of Artificial Sequence: Synthetic oligonucleotide
  source 1..27: mol_type = other RNA
tcaccagtctctggacaatcgcaatgg

SEQ ID NO: 295 - RNA, 25 nt, synthetic construct
  misc_feature 1..25: note = Description of Artificial Sequence: Synthetic oligonucleotide
  source 1..25: mol_type = other RNA
ttgcgattgtccagagactggtgac

SEQ ID NO: 296 - RNA, 27 nt, synthetic construct
  misc_feature 1..27: note = Description of Artificial Sequence: Synthetic oligonucleotide
  source 1..27: mol_type = other RNA
gtcaccagtctctggacaatcgcaatg

SEQ ID NO: 297 - RNA, 25 nt, synthetic construct
  misc_feature 1..25: note = Description of Artificial Sequence: Synthetic oligonucleotide
  source 1..25: mol_type = other RNA
tgcgattgtccagagactggtgaca

SEQ ID NO: 298 - RNA, 27 nt, synthetic construct
  misc_feature 1..27: note = Description of Artificial Sequence: Synthetic oligonucleotide
  source 1..27: mol_type = other RNA
tgtcaccagtctctggacaatcgcaat

SEQ ID NO: 299 - RNA, 25 nt, synthetic construct
  misc_feature 1..25: note = Description of Artificial Sequence: Synthetic oligonucleotide
  source 1..25: mol_type = other RNA
gcgattgtccagagactggtgacat

SEQ ID NO: 300 - RNA, 27 nt, synthetic construct
  misc_feature 1..27: note = Description of Artificial Sequence: Synthetic oligonucleotide
  source 1..27: mol_type = other RNA
atgtcaccagtctctggacaatcgcaa

SEQ ID NO: 301 - RNA, 25 nt, synthetic construct
  misc_feature 1..25: note = Description of Artificial Sequence: Synthetic oligonucleotide
  source 1..25: mol_type = other RNA
cgattgtccagagactggtgacatg

SEQ ID NO: 302 - RNA, 27 nt, synthetic construct
  misc_feature 1..27: note = Description of Artificial Sequence: Synthetic oligonucleotide
  source 1..27: mol_type = other RNA
catgtcaccagtctctggacaatcgca

SEQ ID NO: 303 - RNA, 25 nt, synthetic construct
  misc_feature 1..25: note = Description of Artificial Sequence: Synthetic oligonucleotide
  source 1..25: mol_type = other RNA
attgtccagagactggtgacatggc

SEQ ID NO: 304 - RNA, 27 nt, synthetic construct
  misc_feature 1..27: note = Description of Artificial Sequence: Synthetic oligonucleotide
  source 1..27: mol_type = other RNA
gccatgtcaccagtctctggacaatcg

SEQ ID NO: 305 - RNA, 25 nt, synthetic construct
  misc_feature 1..25: note = Description of Artificial Sequence: Synthetic oligonucleotide
  source 1..25: mol_type = other RNA
gtccagagactggtgacatggcttc

SEQ ID NO: 306 - RNA, 27 nt, synthetic construct
  misc_feature 1..27: note = Description of Artificial Sequence: Synthetic oligonucleotide
  source 1..27: mol_type = other RNA
gaagccatgtcaccagtctctggacaa

SEQ ID NO: 307 - RNA, 25 nt, synthetic construct
  misc_feature 1..25: note = Description of Artificial Sequence: Synthetic oligonucleotide
  source 1..25: mol_type = other RNA
ccagagactggtgacatggcttcca

SEQ ID NO: 308 - RNA, 27 nt, synthetic construct
  misc_feature 1..27: note = Description of Artificial Sequence: Synthetic oligonucleotide
  source 1..27: mol_type = other RNA
tggaagccatgtcaccagtctctggac

SEQ ID NO: 309 - RNA, 25 nt, synthetic construct
  misc_feature 1..25: note = Description of Artificial Sequence: Synthetic oligonucleotide
  source 1..25: mol_type = other RNA
cagagactggtgacatggcttccag

SEQ ID NO: 310 - RNA, 27 nt, synthetic construct
  misc_feature 1..27: note = Description of Artificial Sequence: Synthetic oligonucleotide
  source 1..27: mol_type = other RNA
ctggaagccatgtcaccagtctctgga

SEQ ID NO: 311 - RNA, 25 nt, synthetic construct
  misc_feature 1..25: note = Description of Artificial Sequence: Synthetic oligonucleotide
  source 1..25: mol_type = other RNA
agagactggtgacatggcttccaga

SEQ ID NO: 312 - RNA, 27 nt, synthetic construct
  misc_feature 1..27: note = Description of Artificial Sequence: Synthetic oligonucleotide
  source 1..27: mol_type = other RNA
tctggaagccatgtcaccagtctctgg

SEQ ID NO: 313 - RNA, 25 nt, synthetic construct
  misc_feature 1..25: note = Description of Artificial Sequence: Synthetic oligonucleotide
  source 1..25: mol_type = other RNA
gagactggtgacatggcttccagat

SEQ ID NO: 314 - RNA, 27 nt, synthetic construct
  misc_feature 1..27: note = Description of Artificial Sequence: Synthetic oligonucleotide
  source 1..27: mol_type = other RNA
atctggaagccatgtcaccagtctctg

SEQ ID NO: 315 - RNA, 25 nt, synthetic construct
  misc_feature 1..25: note = Description of Artificial Sequence: Synthetic oligonucleotide
  source 1..25: mol_type = other RNA
agactggtgacatggcttccagata

SEQ ID NO: 316 - RNA, 27 nt, synthetic construct
  misc_feature 1..27: note = Description of Artificial Sequence: Synthetic oligonucleotide
  source 1..27: mol_type = other RNA
tatctggaagccatgtcaccagtctct

SEQ ID NO: 317 - RNA, 25 nt, synthetic construct
  misc_feature 1..25: note = Description of Artificial Sequence: Synthetic oligonucleotide
  source 1..25: mol_type = other RNA
gactggtgacatggcttccagatat

SEQ ID NO: 318 - RNA, 27 nt, synthetic construct
  misc_feature 1..27: note = Description of Artificial Sequence: Synthetic oligonucleotide
  source 1..27: mol_type = other RNA
atatctggaagccatgtcaccagtctc

SEQ ID NO: 319 - RNA, 25 nt, synthetic construct
  misc_feature 1..25: note = Description of Artificial Sequence: Synthetic oligonucleotide
  source 1..25: mol_type = other RNA
actggtgacatggcttccagatatg

SEQ ID NO: 320 - RNA, 27 nt, synthetic construct
  misc_feature 1..27: note = Description of Artificial Sequence: Synthetic oligonucleotide
  source 1..27: mol_type = other RNA
catatctggaagccatgtcaccagtct

SEQ ID NO: 321 - RNA, 25 nt, synthetic construct
  misc_feature 1..25: note = Description of Artificial Sequence: Synthetic oligonucleotide
  source 1..25: mol_type = other RNA
ctggtgacatggcttccagatatgc

SEQ ID NO: 322 - RNA, 27 nt, synthetic construct
  misc_feature 1..27: note = Description of Artificial Sequence: Synthetic oligonucleotide
  source 1..27: mol_type = other RNA
gcatatctggaagccatgtcaccagtc

SEQ ID NO: 323 - RNA, 25 nt, synthetic construct
  misc_feature 1..25: note = Description of Artificial Sequence: Synthetic oligonucleotide
  source 1..25: mol_type = other RNA
gacatggcttccagatatgcccgac

SEQ ID NO: 324 - RNA, 27 nt, synthetic construct
  misc_feature 1..27: note = Description of Artificial Sequence: Synthetic oligonucleotide
  source 1..27: mol_type = other RNA
gtcgggcatatctggaagccatgtcac

SEQ ID NO: 325 - RNA, 25 nt, synthetic construct
  misc_feature 1..25: note = Description of Artificial Sequence: Synthetic oligonucleotide
  source 1..25: mol_type = other RNA
catggcttccagatatgcccgacga

SEQ ID NO: 326 - RNA, 27 nt, synthetic construct
  misc_feature 1..27: note = Description of Artificial Sequence: Synthetic oligonucleotide
  source 1..27: mol_type = other RNA
tcgtcgggcatatctggaagccatgtc

SEQ ID NO: 327 - RNA, 25 nt, synthetic construct
  misc_feature 1..25: note = Description of Artificial Sequence: Synthetic oligonucleotide
  source 1..25: mol_type = other RNA
cagatatgcccgacgatgtcctgtg

SEQ ID NO: 328 - RNA, 27 nt, synthetic construct
  misc_feature 1..27: note = Description of Artificial Sequence: Synthetic oligonucleotide
  source 1..27: mol_type = other RNA
cacaggacatcgtcgggcatatctgga

SEQ ID NO: 329 - RNA, 25 nt, synthetic construct
  misc_feature 1..25: note = Description of Artificial Sequence: Synthetic oligonucleotide
  source 1..25: mol_type = other RNA
ctcacaggtgttcactcgagtgctg

SEQ ID NO: 330 - RNA, 27 nt, synthetic construct
  misc_feature 1..27: note = Description of Artificial Sequence: Synthetic oligonucleotide
  source 1..27: mol_type = other RNA
cagcactcgagtgaacacctgtgaggt

SEQ ID NO: 331 - RNA, 25 nt, synthetic construct
  misc_feature 1..25: note = Description of Artificial Sequence: Synthetic oligonucleotide
  source 1..25: mol_type = other RNA
cactcgagtgctgatgtgtctgctc

SEQ ID NO: 332 - RNA, 27 nt, synthetic construct
  misc_feature 1..27: note = Description of Artificial Sequence: Synthetic oligonucleotide
  source 1..27: mol_type = other RNA
gagcagacacatcagcactcgagtgaa

SEQ ID NO: 333 - RNA, 25 nt, synthetic construct
  misc_feature 1..25: note = Description of Artificial Sequence: Synthetic oligonucleotide
  source 1..25: mol_type = other RNA
ctcgagtgctgatgtgtctgctccc

SEQ ID NO: 334 - RNA, 27 nt, synthetic construct
  misc_feature 1..27: note = Description of Artificial Sequence: Synthetic oligonucleotide
  source 1..27: mol_type = other RNA
gggagcagacacatcagcactcgagtg

SEQ ID NO: 335 - RNA, 25 nt, synthetic construct
  misc_feature 1..25: note = Description of Artificial Sequence: Synthetic oligonucleotide
  source 1..25: mol_type = other RNA
cccaaatgccagtgagcagccaaca

SEQ ID NO: 336 - RNA, 27 nt, synthetic construct
  misc_feature 1..27: note = Description of Artificial Sequence: Synthetic oligonucleotide
  source 1..27: mol_type = other RNA
tgttggctgctcactggcatttgggac

SEQ ID NO: 337 - RNA, 25 nt, synthetic construct
  misc_feature 1..25: note = Description of Artificial Sequence: Synthetic oligonucleotide
  source 1..25: mol_type = other RNA
tcaggtccagcctgaacttcttctt

SEQ ID NO: 338 - RNA, 27 nt, synthetic construct
  misc_feature 1..27: note = Description of Artificial Sequence: Synthetic oligonucleotide
  source 1..27: mol_type = other RNA
aagaagaagttcaggctggacctgagg

SEQ ID NO: 339 - RNA, 25 nt, synthetic construct
  misc_feature 1..25: note = Description of Artificial Sequence: Synthetic oligonucleotide
  source 1..25: mol_type = other RNA
caggtccagcctgaacttcttcttg

SEQ ID NO: 340 - RNA, 27 nt, synthetic construct
  misc_feature 1..27: note = Description of Artificial Sequence: Synthetic oligonucleotide
  source 1..27: mol_type = other RNA
caagaagaagttcaggctggacctgag

SEQ ID NO: 341 - RNA, 25 nt, synthetic construct
  misc_feature 1..25: note = Description of Artificial Sequence: Synthetic oligonucleotide
  source 1..25: mol_type = other RNA
aggtccagcctgaacttcttcttgg

SEQ ID NO: 342 - RNA, 27 nt, synthetic construct
  misc_feature 1..27: note = Description of Artificial Sequence: Synthetic oligonucleotide
  source 1..27: mol_type = other RNA
ccaagaagaagttcaggctggacctga

SEQ ID NO: 343 - RNA, 25 nt, synthetic construct
  misc_feature 1..25: note = Description of Artificial Sequence: Synthetic oligonucleotide
  source 1..25: mol_type = other RNA
caataaagtacctgctggtgctgag

SEQ ID NO: 344 - RNA, 27 nt, synthetic construct
  misc_feature 1..27: note = Description of Artificial Sequence: Synthetic oligonucleotide
  source 1..27: mol_type = other RNA
ctcagcaccagcaggtactttattgcc

SEQ ID NO: 345 - RNA, 25 nt, synthetic construct
  misc_feature 1..25: note = Description of Artificial Sequence: Synthetic oligonucleotide
  source 1..25: mol_type = other RNA
aataaagtacctgctggtgctgagg

SEQ ID NO: 346 - RNA, 27 nt, synthetic construct
  misc_feature 1..27: note = Description of Artificial Sequence: Synthetic oligonucleotide
  source 1..27: mol_type = other RNA
cctcagcaccagcaggtactttattgc

SEQ ID NO: 347 - RNA, 25 nt, synthetic construct
  misc_feature 1..25: note = Description of Artificial Sequence: Synthetic oligonucleotide
  source 1..25: mol_type = other RNA
ataaagtacctgctggtgctgaggg

SEQ ID NO: 348 - RNA, 27 nt, synthetic construct
  misc_feature 1..27: note = Description of Artificial Sequence: Synthetic oligonucleotide
  source 1..27: mol_type = other RNA
ccctcagcaccagcaggtactttattg

SEQ ID NO: 349 - RNA, 25 nt, synthetic construct
  misc_feature 1..25: note = Description of Artificial Sequence: Synthetic oligonucleotide
  source 1..25: mol_type = other RNA
ctctccacctttcccagtttttcac

SEQ ID NO: 350 - RNA, 27 nt, synthetic construct
  misc_feature 1..27: note = Description of Artificial Sequence: Synthetic oligonucleotide
  source 1..27: mol_type = other RNA
gtgaaaaactgggaaaggtggagagcc

SEQ ID NO: 351 - RNA, 25 nt, synthetic construct
  misc_feature 1..25: note = Description of Artificial Sequence: Synthetic oligonucleotide
  source 1..25: mol_type = other RNA
ctccacctttcccagtttttcacta

SEQ ID NO: 352 - RNA, 27 nt, synthetic construct
  misc_feature 1..27: note = Description of Artificial Sequence: Synthetic oligonucleotide
  source 1..27: mol_type = other RNA
tagtgaaaaactgggaaaggtggagag

SEQ ID NO: 353 - RNA, 25 nt, synthetic construct
  misc_feature 1..25: note = Description of Artificial Sequence: Synthetic oligonucleotide
  source 1..25: mol_type = other RNA
tccacctttcccagtttttcactag

SEQ ID NO: 354 - RNA, 27 nt, synthetic construct
  misc_feature 1..27: note = Description of Artificial Sequence: Synthetic oligonucleotide
  source 1..27: mol_type = other RNA
ctagtgaaaaactgggaaaggtggaga

SEQ ID NO: 355 - RNA, 25 nt, synthetic construct
  misc_feature 1..25: note = Description of Artificial Sequence: Synthetic oligonucleotide
  source 1..25: mol_type = other RNA
ccacctttcccagtttttcactaga

SEQ ID NO: 356 - RNA, 27 nt, synthetic construct
  misc_feature 1..27: note = Description of Artificial Sequence: Synthetic oligonucleotide
  source 1..27: mol_type = other RNA
tctagtgaaaaactgggaaaggtggag

SEQ ID NO: 357 - RNA, 25 nt, synthetic construct
  misc_feature 1..25: note = Description of Artificial Sequence: Synthetic oligonucleotide
  source 1..25: mol_type = other RNA
cacctttcccagtttttcactagag

SEQ ID NO: 358 - RNA, 27 nt, synthetic construct
  misc_feature 1..27: note = Description of Artificial Sequence: Synthetic oligonucleotide
  source 1..27: mol_type = other RNA
ctctagtgaaaaactgggaaaggtgga

SEQ ID NO: 359 - RNA, 25 nt, synthetic construct
  misc_feature 1..25: note = Description of Artificial Sequence: Synthetic oligonucleotide
  source 1..25: mol_type = other RNA
acctttcccagtttttcactagaga

SEQ ID NO: 360 - RNA, 27 nt, synthetic construct
  misc_feature 1..27: note = Description of Artificial Sequence: Synthetic oligonucleotide
  source 1..27: mol_type = other RNA
tctctagtgaaaaactgggaaaggtgg

SEQ ID NO: 361 - RNA, 25 nt, synthetic construct
  misc_feature 1..25: note = Description of Artificial Sequence: Synthetic oligonucleotide
  source 1..25: mol_type = other RNA
cctttcccagtttttcactagagaa

SEQ ID NO: 362 - RNA, 27 nt, synthetic construct
  misc_feature 1..27: note = Description of Artificial Sequence: Synthetic oligonucleotide
  source 1..27: mol_type = other RNA
ttctctagtgaaaaactgggaaaggtg

SEQ ID NO: 363 - RNA, 25 nt, synthetic construct
  misc_feature 1..25: note = Description of Artificial Sequence: Synthetic oligonucleotide
  source 1..25: mol_type = other RNA
agtttttcactagagaagagtctgt

SEQ ID NO: 364 - RNA, 27 nt, synthetic construct
  misc_feature 1..27: note = Description of Artificial Sequence: Synthetic oligonucleotide
  source 1..27: mol_type = other RNA
acagactcttctctagtgaaaaactgg

SEQ ID NO: 365 - RNA, 25 nt, synthetic construct
  misc_feature 1..25: note = Description of Artificial Sequence: Synthetic oligonucleotide
  source 1..25: mol_type = other RNA
tctagcagattctttcagaggtgct

SEQ ID NO: 366 - RNA, 27 nt, synthetic construct
  misc_feature 1..27: note = Description of Artificial Sequence: Synthetic oligonucleotide
  source 1..27: mol_type = other RNA
agcacctctgaaagaatctgctagact

SEQ ID NO: 367 - RNA, 25 nt, synthetic construct
  misc_feature 1..25: note = Description of Artificial Sequence: Synthetic oligonucleotide
  source 1..25: mol_type = other RNA
agcagattctttcagaggtgctaaa

SEQ ID NO: 368 - RNA, 27 nt, synthetic construct
  misc_feature 1..27: note = Description of Artificial Sequence: Synthetic oligonucleotide
  source 1..27: mol_type = other RNA
tttagcacctctgaaagaatctgctag

SEQ ID NO: 369 - RNA, 25 nt, synthetic construct
  misc_feature 1..25: note = Description of Artificial Sequence: Synthetic oligonucleotide
  source 1..25: mol_type = other RNA
gcagattctttcagaggtgctaaag

SEQ ID NO: 370 - RNA, 27 nt, synthetic construct
  misc_feature 1..27: note = Description of Artificial Sequence: Synthetic oligonucleotide
  source 1..27: mol_type = other RNA
ctttagcacctctgaaagaatctgcta

SEQ ID NO: 371 - RNA, 25 nt, synthetic construct
  misc_feature 1..25: note = Description of Artificial Sequence: Synthetic oligonucleotide
  source 1..25: mol_type = other RNA
cagattctttcagaggtgctaaagt

SEQ ID NO: 372 - RNA, 27 nt, synthetic construct
  misc_feature 1..27: note = Description of Artificial Sequence: Synthetic oligonucleotide
  source 1..27: mol_type = other RNA
actttagcacctctgaaagaatctgct

SEQ ID NO: 373 - RNA, 25 nt, synthetic construct
  misc_feature 1..25: note = Description of Artificial Sequence: Synthetic oligonucleotide
  source 1..25: mol_type = other RNA
agattctttcagaggtgctaaagtt

SEQ ID NO: 374 - RNA, 27 nt, synthetic construct
  misc_feature 1..27: note = Description of Artificial Sequence: Synthetic oligonucleotide
  source 1..27: mol_type = other RNA
aactttagcacctctgaaagaatctgc

SEQ ID NO: 375 - RNA, 25 nt, synthetic construct
  misc_feature 1..25: note = Description of Artificial Sequence: Synthetic oligonucleotide
  source 1..25: mol_type = other RNA
gattctttcagaggtgctaaagttt

SEQ ID NO: 376 - RNA, 27 nt, synthetic construct
  misc_feature 1..27: note = Description of Artificial Sequence: Synthetic oligonucleotide
  source 1..27: mol_type = other RNA
aaactttagcacctctgaaagaatctg

SEQ ID NO: 377 - RNA, 25 nt, synthetic construct
  misc_feature 1..25: note = Description of Artificial Sequence: Synthetic oligonucleotide
  source 1..25: mol_type = other RNA
attctttcagaggtgctaaagtttc

SEQ ID NO: 378 - RNA, 27 nt, synthetic construct
  misc_feature 1..27: note = Description of Artificial Sequence: Synthetic oligonucleotide
  source 1..27: mol_type = other RNA
gaaactttagcacctctgaaagaatct

SEQ ID NO: 379 - RNA, 25 nt, synthetic construct
  misc_feature 1..25: note = Description of Artificial Sequence: Synthetic oligonucleotide
  source 1..25: mol_type = other RNA
aggtgctaaagtttcccatctttgt

SEQ ID NO: 380 - RNA, 27 nt, synthetic construct
  misc_feature 1..27: note = Description of Artificial Sequence: Synthetic oligonucleotide
  source 1..27: mol_type = other RNA
acaaagatgggaaactttagcacctct

SEQ ID NO: 381 - RNA, 25 nt, synthetic construct
  misc_feature 1..25: note = Description of Artificial Sequence: Synthetic oligonucleotide
  source 1..25: mol_type = other RNA
ggtgctaaagtttcccatctttgtg

SEQ ID NO: 382 - RNA, 27 nt, synthetic construct
  misc_feature 1..27: note = Description of Artificial Sequence: Synthetic oligonucleotide
  source 1..27: mol_type = other RNA
cacaaagatgggaaactttagcacctc

SEQ ID NO: 383 - RNA, 25 nt, synthetic construct
  misc_feature 1..25: note = Description of Artificial Sequence: Synthetic oligonucleotide
  source 1..25: mol_type = other RNA
gtgctaaagtttcccatctttgtgc

SEQ ID NO: 384 - RNA, 27 nt, synthetic construct
  misc_feature 1..27: note = Description of Artificial Sequence: Synthetic oligonucleotide
  source 1..27: mol_type = other RNA
gcacaaagatgggaaactttagcacct

SEQ ID NO: 385 - RNA, 25 nt, synthetic construct
  misc_feature 1..25: note = Description of Artificial Sequence: Synthetic oligonucleotide
  source 1..25: mol_type = other RNA
gctaaagtttcccatctttgtgcag

SEQ ID NO: 386 - RNA, 27 nt, synthetic construct
  misc_feature 1..27: note = Description of Artificial Sequence: Synthetic oligonucleotide
  source 1..27: mol_type = other RNA
ctgcacaaagatgggaaactttagcac

SEQ ID NO: 387 - RNA, 25 nt, synthetic construct
  misc_feature 1..25: note = Description of Artificial Sequence: Synthetic oligonucleotide
  source 1..25: mol_type = other RNA
ctaaagtttcccatctttgtgcagc

SEQ ID NO: 388 - RNA, 27 nt, synthetic construct
  misc_feature 1..27: note = Description of Artificial Sequence: Synthetic oligonucleotide
  source 1..27: mol_type = other RNA
gctgcacaaagatgggaaactttagca

SEQ ID NO: 389 - RNA, 25 nt, synthetic construct
  misc_feature 1..25: note = Description of Artificial Sequence: Synthetic oligonucleotide
  source 1..25: mol_type = other RNA
taaagtttcccatctttgtgcagct

SEQ ID NO: 390 - RNA, 27 nt, synthetic construct
  misc_feature 1..27: note = Description of Artificial Sequence: Synthetic oligonucleotide
  source 1..27: mol_type = other RNA
agctgcacaaagatgggaaactttagc

SEQ ID NO: 391 - RNA, 25 nt, synthetic construct
  misc_feature 1..25: note = Description of Artificial Sequence: Synthetic oligonucleotide
  source 1..25: mol_type = other RNA
aaagtttcccatctttgtgcagcta

SEQ ID NO: 392 - RNA, 27 nt, synthetic construct
  misc_feature 1..27: note = Description of Artificial Sequence: Synthetic oligonucleotide
  source 1..27: mol_type = other RNA
tagctgcacaaagatgggaaactttag

SEQ ID NO: 393 - RNA, 25 nt, synthetic construct
  misc_feature 1..25: note = Description of Artificial Sequence: Synthetic oligonucleotide
  source 1..25: mol_type = other RNA
aagtttcccatctttgtgcagctac

SEQ ID NO: 394 - RNA, 27 nt, synthetic construct
  misc_feature 1..27: note = Description of Artificial Sequence: Synthetic oligonucleotide
  source 1..27: mol_type = other RNA
gtagctgcacaaagatgggaaacttta

SEQ ID NO: 395 - RNA, 25 nt, synthetic construct
  misc_feature 1..25: note = Description of Artificial Sequence: Synthetic oligonucleotide
  source 1..25: mol_type = other RNA
agtttcccatctttgtgcagctacc

SEQ ID NO: 396 - RNA, 27 nt, synthetic construct
  misc_feature 1..27: note = Description of Artificial Sequence: Synthetic oligonucleotide
  source 1..27: mol_type = other RNA
ggtagctgcacaaagatgggaaacttt

SEQ ID NO: 397 - RNA, 25 nt, synthetic construct
  misc_feature 1..25: note = Description of Artificial Sequence: Synthetic oligonucleotide
  source 1..25: mol_type = other RNA
gtttcccatctttgtgcagctacct

SEQ ID NO: 398 - RNA, 27 nt, synthetic construct
  misc_feature 1..27: note = Description of Artificial Sequence: Synthetic oligonucleotide
  source 1..27: mol_type = other RNA
aggtagctgcacaaagatgggaaactt

SEQ ID NO: 399 - RNA, 25 nt, synthetic construct
  misc_feature 1..25: note = Description of Artificial Sequence: Synthetic oligonucleotide
  source 1..25: mol_type = other RNA
atctttgtgcagctacctccgcatt

SEQ ID NO: 400 - RNA, 27 nt, synthetic construct
  misc_feature 1..27: note = Description of Artificial Sequence: Synthetic oligonucleotide
  source 1..27: mol_type = other RNA
aatgcggaggtagctgcacaaagatgg

SEQ ID NO: 401 - RNA, 25 nt, synthetic construct
  misc_feature 1..25: note = Description of Artificial Sequence: Synthetic oligonucleotide
  source 1..25: mol_type = other RNA
gtgcagctacctccgcattgctgtg

SEQ ID NO: 402 - RNA, 27 nt, synthetic construct
  misc_feature 1..27: note = Description of Artificial Sequence: Synthetic oligonucleotide
  source 1..27: mol_type = other RNA
cacagcaatgcggaggtagctgcacaa

SEQ ID NO: 403 - RNA, 25 nt, synthetic construct
  misc_feature 1..25: note = Description of Artificial Sequence: Synthetic oligonucleotide
  source 1..25: mol_type = other RNA
ccagcctctgagctgagttggtttt

SEQ ID NO: 404 - RNA, 27 nt, synthetic construct
  misc_feature 1..27: note = Description of Artificial Sequence: Synthetic oligonucleotide
  source 1..27: mol_type = other RNA
aaaaccaactcagctcagaggctggga

SEQ ID NO: 405 - RNA, 25 nt, synthetic construct
  misc_feature 1..25: note = Description of Artificial Sequence: Synthetic oligonucleotide
  source 1..25: mol_type = other RNA
cagcctctgagctgagttggtttta

SEQ ID NO: 406 - RNA, 27 nt, synthetic construct
  misc_feature 1..27: note = Description of Artificial Sequence: Synthetic oligonucleotide
  source 1..27: mol_type = other RNA
taaaaccaactcagctcagaggctggg

SEQ ID NO: 407 - RNA, 25 nt, synthetic construct
  misc_feature 1..25: note = Description of Artificial Sequence: Synthetic oligonucleotide
  source 1..25: mol_type = other RNA
agcctctgagctgagttggttttat

SEQ ID NO: 408 - RNA, 27 nt, synthetic construct
  misc_feature 1..27: note = Description of Artificial Sequence: Synthetic oligonucleotide
  source 1..27: mol_type = other RNA
ataaaaccaactcagctcagaggctgg

SEQ ID NO: 409 - RNA, 25 nt, synthetic construct
  misc_feature 1..25: note = Description of Artificial Sequence: Synthetic oligonucleotide
  source 1..25: mol_type = other RNA
gcctctgagctgagttggttttatg

SEQ ID NO: 410 - RNA, 27 nt, synthetic construct
  misc_feature 1..27: note = Description of Artificial Sequence: Synthetic oligonucleotide
  source 1..27: mol_type = other RNA
cataaaaccaactcagctcagaggctg

SEQ ID NO: 411 - RNA, 25 nt, synthetic construct
  misc_feature 1..25: note = Description of Artificial Sequence: Synthetic oligonucleotide
  source 1..25: mol_type = other RNA
cctctgagctgagttggttttatga

SEQ ID NO: 412 - RNA, 27 nt, synthetic construct
  misc_feature 1..27: note = Description of Artificial Sequence: Synthetic oligonucleotide
  source 1..27: mol_type = other RNA
tcataaaaccaactcagctcagaggct

SEQ ID NO: 413 - RNA, 25 nt, synthetic construct
  misc_feature 1..25: note = Description of Artificial Sequence: Synthetic oligonucleotide
  source 1..25: mol_type = other RNA
ctctgagctgagttggttttatgaa

SEQ ID NO: 414 - RNA, 27 nt, synthetic construct
  misc_feature 1..27: note = Description of Artificial Sequence: Synthetic oligonucleotide
  source 1..27: mol_type = other RNA
ttcataaaaccaactcagctcagaggc

SEQ ID NO: 415 - RNA, 25 nt, synthetic construct
  misc_feature 1..25: note = Description of Artificial Sequence: Synthetic oligonucleotide
  source 1..25: mol_type = other RNA
tctgagctgagttggttttatgaaa

SEQ ID NO: 416 - RNA, 27 nt, synthetic construct
  misc_feature 1..27: note = Description of Artificial Sequence: Synthetic oligonucleotide
  source 1..27: mol_type = other RNA
tttcataaaaccaactcagctcagagg

SEQ ID NO: 417 - RNA, 25 nt, synthetic construct
  misc_feature 1..25: note = Description of Artificial Sequence: Synthetic oligonucleotide
  source 1..25: mol_type = other RNA
tgagctgagttggttttatgaaaag

SEQ ID NO: 418 - RNA, 27 nt, synthetic construct
  misc_feature 1..27: note = Description of Artificial Sequence: Synthetic oligonucleotide
  source 1..27: mol_type = other RNA
cttttcataaaaccaactcagctcaga

SEQ ID NO: 419 - RNA, 25 nt, synthetic construct
  misc_feature 1..25: note = Description of Artificial Sequence: Synthetic oligonucleotide
  source 1..25: mol_type = other RNA
tgagttggttttatgaaaagctagg

SEQ ID NO: 420 - RNA, 27 nt, synthetic construct
  misc_feature 1..27: note = Description of Artificial Sequence: Synthetic oligonucleotide
  source 1..27: mol_type = other RNA
cctagcttttcataaaaccaactcagc

SEQ ID NO: 421 - RNA, 25 nt, synthetic construct
  misc_feature 1..25: note = Description of Artificial Sequence: Synthetic oligonucleotide
  source 1..25: mol_type = other RNA
gagttggttttatgaaaagctagga

SEQ ID NO: 422 - RNA, 27 nt, synthetic construct
  misc_feature 1..27: note = Description of Artificial Sequence: Synthetic oligonucleotide
  source 1..27: mol_type = other RNA
tcctagcttttcataaaaccaactcag

SEQ ID NO: 423 - RNA, 25 nt, synthetic construct
  misc_feature 1..25: note = Description of Artificial Sequence: Synthetic oligonucleotide
  source 1..25: mol_type = other RNA
ttggttttatgaaaagctaggaagc

SEQ ID NO: 424 - RNA, 27 nt, synthetic construct
  misc_feature 1..27: note = Description of Artificial Sequence: Synthetic oligonucleotide
  source 1..27: mol_type = other RNA
gcttcctagcttttcataaaaccaact

SEQ ID NO: 425 - RNA, 25 nt, synthetic construct
  misc_feature 1..25: note = Description of Artificial Sequence: Synthetic oligonucleotide
  source 1..25: mol_type = other RNA
tggttttatgaaaagctaggaagca

SEQ ID NO: 426 - RNA, 27 nt, synthetic construct
  misc_feature 1..27: note = Description of Artificial Sequence: Synthetic oligonucleotide
  source 1..27: mol_type = other RNA
tgcttcctagcttttcataaaaccaac

SEQ ID NO: 427 - RNA, 25 nt, synthetic construct
  misc_feature 1..25: note = Description of Artificial Sequence: Synthetic oligonucleotide
  source 1..25: mol_type = other RNA
ggttttatgaaaagctaggaagcaa

SEQ ID NO: 428 - RNA, 27 nt, synthetic construct
  misc_feature 1..27: note = Description of Artificial Sequence: Synthetic oligonucleotide
  source 1..27: mol_type = other RNA
ttgcttcctagcttttcataaaaccaa

SEQ ID NO: 429 - RNA, 25 nt, synthetic construct
  misc_feature 1..25: note = Description of Artificial Sequence: Synthetic oligonucleotide
  source 1..25: mol_type = other RNA
ttttatgaaaagctaggaagcaacc

SEQ ID NO: 430 - RNA, 27 nt, synthetic construct
  misc_feature 1..27: note = Description of Artificial Sequence: Synthetic oligonucleotide
  source 1..27: mol_type = other RNA
ggttgcttcctagcttttcataaaacc

SEQ ID NO: 431 - RNA, 25 nt, synthetic construct
  misc_feature 1..25: note = Description of Artificial Sequence: Synthetic oligonucleotide
  source 1..25: mol_type = other RNA
ttatgaaaagctaggaagcaacctt

SEQ ID NO: 432 - RNA, 27 nt, synthetic construct
  misc_feature 1..27: note = Description of Artificial Sequence: Synthetic oligonucleotide
  source 1..27: mol_type = other RNA
aaggttgcttcctagcttttcataaaa

SEQ ID NO: 433 - RNA, 25 nt, synthetic construct
  misc_feature 1..25: note = Description of Artificial Sequence: Synthetic oligonucleotide
  source 1..25: mol_type = other RNA
tatgaaaagctaggaagcaaccttt

SEQ ID NO: 434 - RNA, 27 nt, synthetic construct
  misc_feature 1..27: note = Description of Artificial Sequence: Synthetic oligonucleotide
  source 1..27: mol_type = other RNA
aaaggttgcttcctagcttttcataaa

SEQ ID NO: 435 - RNA, 25 nt, synthetic construct
  misc_feature 1..25: note = Description of Artificial Sequence: Synthetic oligonucleotide
  source 1..25: mol_type = other RNA
atgaaaagctaggaagcaacctttc

SEQ ID NO: 436 - RNA, 27 nt, synthetic construct
  misc_feature 1..27: note = Description of Artificial Sequence: Synthetic oligonucleotide
  source 1..27: mol_type = other RNA
gaaaggttgcttcctagcttttcataa

SEQ ID NO: 437 - RNA, 25 nt, synthetic construct
  misc_feature 1..25: note = Description of Artificial Sequence: Synthetic oligonucleotide
  source 1..25: mol_type = other RNA
ccagcacttaactctaatacatcag

SEQ ID NO: 438 - RNA, 27 nt, synthetic construct
  misc_feature 1..27: note = Description of Artificial Sequence: Synthetic oligonucleotide
  source 1..27: mol_type = other RNA
ctgatgtattagagttaagtgctggac

SEQ ID NO: 439 - RNA, 25 nt, synthetic construct
  misc_feature 1..25: note = Description of Artificial Sequence: Synthetic oligonucleotide
  source 1..25: mol_type = other RNA
cagcacttaactctaatacatcagc

SEQ ID NO: 440 - RNA, 27 nt, synthetic construct
  misc_feature 1..27: note = Description of Artificial Sequence: Synthetic oligonucleotide
  source 1..27: mol_type = other RNA
gctgatgtattagagttaagtgctgga

SEQ ID NO: 441 - RNA, 25 nt, synthetic construct
  misc_feature 1..25: note = Description of Artificial Sequence: Synthetic oligonucleotide
  source 1..25: mol_type = other RNA
taatacatcagcatgcgttaattca

SEQ ID NO: 442 - RNA, 27 nt, synthetic construct
  misc_feature 1..27: note = Description of Artificial Sequence: Synthetic oligonucleotide
  source 1..27: mol_type = other RNA
tgaattaacgcatgctgatgtattaga

SEQ ID NO: 443 - RNA, 25 nt, synthetic construct
  misc_feature 1..25: note = Description of Artificial Sequence: Synthetic oligonucleotide
  source 1..25: mol_type = other RNA
aatacatcagcatgcgttaattcag

SEQ ID NO: 444 - RNA, 27 nt, synthetic construct
  misc_feature 1..27: note = Description of Artificial Sequence: Synthetic oligonucleotide
  source 1..27: mol_type = other RNA
ctgaattaacgcatgctgatgtattag

SEQ ID NO: 445 - RNA, 25 nt, synthetic construct
  misc_feature 1..25: note = Description of Artificial Sequence: Synthetic oligonucleotide
  source 1..25: mol_type = other RNA
agcatgcgttaattcagctggttgg

SEQ ID NO: 446 - RNA, 27 nt, synthetic construct
  misc_feature 1..27: note = Description of Artificial Sequence: Synthetic oligonucleotide
  source 1..27: mol_type = other RNA
ccaaccagctgaattaacgcatgctga

SEQ ID NO: 447 - RNA, 25 nt, synthetic construct
  misc_feature 1..25: note = Description of Artificial Sequence: Synthetic oligonucleotide
  source 1..25: mol_type = other RNA
gcatgcgttaattcagctggttggg

SEQ ID NO: 448 - RNA, 27 nt, synthetic construct
  misc_feature 1..27: note = Description of Artificial Sequence: Synthetic oligonucleotide
  source 1..27: mol_type = other RNA
cccaaccagctgaattaacgcatgctg

SEQ ID NO: 449 - RNA, 25 nt, synthetic construct
  misc_feature 1..25: note = Description of Artificial Sequence: Synthetic oligonucleotide
  source 1..25: mol_type = other RNA
tgcgttaattcagctggttgggaaa

SEQ ID NO: 450 - RNA, 27 nt, synthetic construct
  misc_feature 1..27: note = Description of Artificial Sequence: Synthetic oligonucleotide
  source 1..27: mol_type = other RNA
tttcccaaccagctgaattaacgcatg

SEQ ID NO: 451 - RNA, 25 nt, synthetic construct
  misc_feature 1..25: note = Description of Artificial Sequence: Synthetic oligonucleotide
  source 1..25: mol_type = other RNA
gcgttaattcagctggttgggaaat

SEQ ID NO: 452 - RNA, 27 nt, synthetic construct
  misc_feature 1..27: note = Description of Artificial Sequence: Synthetic oligonucleotide
  source 1..27: mol_type = other RNA
atttcccaaccagctgaattaacgcat

SEQ ID NO: 453 - RNA, 25 nt, synthetic construct
  misc_feature 1..25: note = Description of Artificial Sequence: Synthetic oligonucleotide
  source 1..25: mol_type = other RNA
cgttaattcagctggttgggaaatg

SEQ ID NO: 454 - RNA, 27 nt, synthetic construct
  misc_feature 1..27: note = Description of Artificial Sequence: Synthetic oligonucleotide
  source 1..27: mol_type = other RNA
catttcccaaccagctgaattaacgca

SEQ ID NO: 455 - RNA, 25 nt, synthetic construct
  misc_feature 1..25: note = Description of Artificial Sequence: Synthetic oligonucleotide
  source 1..25: mol_type = other RNA
gttaattcagctggttgggaaatga

SEQ ID NO: 456 - RNA, 27 nt, synthetic construct
  misc_feature 1..27: note = Description of Artificial Sequence: Synthetic oligonucleotide
  source 1..27: mol_type = other RNA
tcatttcccaaccagctgaattaacgc

SEQ ID NO: 457 - RNA, 25 nt, synthetic construct
  misc_feature 1..25: note = Description of Artificial Sequence: Synthetic oligonucleotide
  source 1..25: mol_type = other RNA
ttaattcagctggttgggaaatgac

SEQ ID NO: 458 - RNA, 27 nt, synthetic construct
  misc_feature 1..27: note = Description of Artificial Sequence: Synthetic oligonucleotide
  source 1..27: mol_type = other RNA
gtcatttcccaaccagctgaattaacg

SEQ ID NO: 459 - RNA, 25 nt, synthetic construct
  misc_feature 1..25: note = Description of Artificial Sequence: Synthetic oligonucleotide
  source 1..25: mol_type = other RNA
taattcagctggttgggaaatgaca

SEQ ID NO: 460 - RNA, 27 nt, synthetic construct
  misc_feature 1..27: note = Description of Artificial Sequence: Synthetic oligonucleotide
  source 1..27: mol_type = other RNA
tgtcatttcccaaccagctgaattaac

SEQ ID NO: 461 - RNA, 25 nt, synthetic construct
  misc_feature 1..25: note = Description of Artificial Sequence: Synthetic oligonucleotide
  source 1..25: mol_type = other RNA
attcagctggttgggaaatgacacc

SEQ ID NO: 462 - RNA, 27 nt, synthetic construct
  misc_feature 1..27: note = Description of Artificial Sequence: Synthetic oligonucleotide
  source 1..27: mol_type = other RNA
ggtgtcatttcccaaccagctgaatta

SEQ ID NO: 463 - RNA, 25 nt, synthetic construct
  misc_feature 1..25: note = Description of Artificial Sequence: Synthetic oligonucleotide
  source 1..25: mol_type = other RNA
ttcagctggttgggaaatgacacca

SEQ ID NO: 464 - RNA, 27 nt, synthetic construct
  misc_feature 1..27: note = Description of Artificial Sequence: Synthetic oligonucleotide
  source 1..27: mol_type = other RNA
tggtgtcatttcccaaccagctgaatt

SEQ ID NO: 465 - RNA, 25 nt, synthetic construct
  misc_feature 1..25: note = Description of Artificial Sequence: Synthetic oligonucleotide
  source 1..25: mol_type = other RNA
tcagctggttgggaaatgacaccag

SEQ ID NO: 466 - RNA, 27 nt, synthetic construct
  misc_feature 1..27: note = Description of Artificial Sequence: Synthetic oligonucleotide
  source 1..27: mol_type = other RNA
ctggtgtcatttcccaaccagctgaat

SEQ ID NO: 467 - RNA, 25 nt, synthetic construct
  misc_feature 1..25: note = Description of Artificial Sequence: Synthetic oligonucleotide
  source 1..25: mol_type = other RNA
cagctggttgggaaatgacaccagg

SEQ ID NO: 468 - RNA, 27 nt, synthetic construct
  misc_feature 1..27: note = Description of Artificial Sequence: Synthetic oligonucleotide
  source 1..27: mol_type = other RNA
cctggtgtcatttcccaaccagctgaa

SEQ ID NO: 469 - RNA, 25 nt, synthetic construct
  misc_feature 1..25: note = Description of Artificial Sequence: Synthetic oligonucleotide
  source 1..25: mol_type = other RNA
agctggttgggaaatgacaccagga

SEQ ID NO: 470 - RNA, 27 nt, synthetic construct
  misc_feature 1..27: note = Description of Artificial Sequence: Synthetic oligonucleotide
  source 1..27: mol_type = other RNA
tcctggtgtcatttcccaaccagctga

SEQ ID NO: 471 - RNA, 25 nt, synthetic construct
  misc_feature 1..25: note = Description of Artificial Sequence: Synthetic oligonucleotide
  source 1..25: mol_type = other RNA
gctggttgggaaatgacaccaggaa

SEQ ID NO: 472 - RNA, 27 nt, synthetic construct
  misc_feature 1..27: note = Description of Artificial Sequence: Synthetic oligonucleotide
  source 1..27: mol_type = other RNA
ttcctggtgtcatttcccaaccagctg

SEQ ID NO: 473 - RNA, 25 nt, synthetic construct
  misc_feature 1..25: note = Description of Artificial Sequence: Synthetic oligonucleotide
  source 1..25: mol_type = other RNA
gcagagggtcccttactgactgttt

SEQ ID NO: 474 - RNA, 27 nt, synthetic construct
  misc_feature 1..27: note = Description of Artificial Sequence: Synthetic oligonucleotide
  source 1..27: mol_type = other RNA
aaacagtcagtaagggaccctctgcac

SEQ ID NO: 475 - RNA, 25 nt, synthetic construct
  misc_feature 1..25: note = Description of Artificial Sequence: Synthetic oligonucleotide
  source 1..25: mol_type = other RNA
cagagggtcccttactgactgtttc

SEQ ID NO: 476 - RNA, 27 nt, synthetic construct
  misc_feature 1..27: note = Description of Artificial Sequence: Synthetic oligonucleotide
  source 1..27: mol_type = other RNA
gaaacagtcagtaagggaccctctgca

SEQ ID NO: 477 - RNA, 25 nt, synthetic construct
  misc_feature 1..25: note = Description of Artificial Sequence: Synthetic oligonucleotide
  source 1..25: mol_type = other RNA
agagggtcccttactgactgtttcg

SEQ ID NO: 478 - RNA, 27 nt, synthetic construct
  misc_feature 1..27: note = Description of Artificial Sequence: Synthetic oligonucleotide
  source 1..27: mol_type = other RNA
cgaaacagtcagtaagggaccctctgc

SEQ ID NO: 479 - RNA, 25 nt, synthetic construct
  misc_feature 1..25: note = Description of Artificial Sequence: Synthetic oligonucleotide
  source 1..25: mol_type = other RNA
cctattaatggtcagactgttccag

SEQ ID NO: 480 - RNA, 27 nt, synthetic construct
  misc_feature 1..27: note = Description of Artificial Sequence: Synthetic oligonucleotide
  source 1..27: mol_type = other RNA
ctggaacagtctgaccattaatagggc

SEQ ID NO: 481 - RNA, 25 nt, synthetic construct
  misc_feature 1..25: note = Description of Artificial Sequence: Synthetic oligonucleotide
  source 1..25: mol_type = other RNA
ctattaatggtcagactgttccagc

SEQ ID NO: 482 - RNA, 27 nt, synthetic construct
  misc_feature 1..27: note = Description of Artificial Sequence: Synthetic oligonucleotide
  source 1..27: mol_type = other RNA
gctggaacagtctgaccattaataggg

SEQ ID NO: 483 - RNA, 25 nt, synthetic construct
  misc_feature 1..25: note = Description of Artificial Sequence: Synthetic oligonucleotide
  source 1..25: mol_type = other RNA
tattaatggtcagactgttccagca

SEQ ID NO: 484 - RNA, 27 nt, synthetic construct
  misc_feature 1..27: note = Description of Artificial Sequence: Synthetic oligonucleotide
  source 1..27: mol_type = other RNA
tgctggaacagtctgaccattaatagg

SEQ ID NO: 485 - RNA, 25 nt, synthetic construct
  misc_feature 1..25: note = Description of Artificial Sequence: Synthetic oligonucleotide
  source 1..25: mol_type = other RNA
attaatggtcagactgttccagcat

SEQ ID NO: 486 - RNA, 27 nt, synthetic construct
  misc_feature 1..27: note = Description of Artificial Sequence: Synthetic oligonucleotide
  source 1..27: mol_type = other RNA
atgctggaacagtctgaccattaatag

SEQ ID NO: 487 - RNA, 25 nt, synthetic construct
  misc_feature 1..25: note = Description of Artificial Sequence: Synthetic oligonucleotide
  source 1..25: mol_type = other RNA
ttaatggtcagactgttccagcatg

SEQ ID NO: 488 - RNA, 27 nt, synthetic construct
  misc_feature 1..27: note = Description of Artificial Sequence: Synthetic oligonucleotide
  source 1..27: mol_type = other RNA
catgctggaacagtctgaccattaata

SEQ ID NO: 489 - RNA, 25 nt, synthetic construct
  misc_feature 1..25: note = Description of Artificial Sequence: Synthetic oligonucleotide
  source 1..25: mol_type = other RNA
taatggtcagactgttccagcatga

SEQ ID NO: 490 - RNA, 27 nt, synthetic construct
  misc_feature 1..27: note = Description of Artificial Sequence: Synthetic oligonucleotide
  source 1..27: mol_type = other RNA
tcatgctggaacagtctgaccattaat

SEQ ID NO: 491 - RNA, 25 nt, synthetic construct
  misc_feature 1..25: note = Description of Artificial Sequence: Synthetic oligonucleotide
  source 1..25: mol_type = other RNA
aatggtcagactgttccagcatgag

SEQ ID NO: 492 - RNA, 27 nt, synthetic construct
  misc_feature 1..27: note = Description of Artificial Sequence: Synthetic oligonucleotide
  source 1..27: mol_type = other RNA
ctcatgctggaacagtctgaccattaa

SEQ ID NO: 493 - RNA, 25 nt, synthetic construct
  misc_feature 1..25: note = Description of Artificial Sequence: Synthetic oligonucleotide
  source 1..25: mol_type = other RNA
agaacgacactgcctgtcaggtggt

SEQ ID NO: 494 - RNA, 27 nt, synthetic construct
  misc_feature 1..27: note = Description of Artificial Sequence: Synthetic oligonucleotide
  source 1..27: mol_type = other RNA
accacctgacaggcagtgtcgttcttg

SEQ ID NO: 495 - RNA, 25 nt, synthetic construct
  misc_feature 1..25: note = Description of Artificial Sequence: Synthetic oligonucleotide
  source 1..25: mol_type = other RNA
cgacactgcctgtcaggtggtctgc

SEQ ID NO: 496 - RNA, 27 nt, synthetic construct
  misc_feature 1..27: note = Description of Artificial Sequence: Synthetic oligonucleotide
  source 1..27: mol_type = other RNA
gcagaccacctgacaggcagtgtcgtt

SEQ ID NO: 497 - RNA, 25 nt, synthetic construct
  misc_feature 1..25: note = Description of Artificial Sequence: Synthetic oligonucleotide
  source 1..25: mol_type = other RNA
aaccttgactactaaaaacgtctcc

SEQ ID NO: 498 - RNA, 27 nt, synthetic construct
  misc_feature 1..27: note = Description of Artificial Sequence: Synthetic oligonucleotide
  source 1..27: mol_type = other RNA
ggagacgtttttagtagtcaaggttat

SEQ ID NO: 499 - RNA, 25 nt, synthetic construct
  misc_feature 1..25: note = Description of Artificial Sequence: Synthetic oligonucleotide
  source 1..25: mol_type = other RNA
tttagaacacctttttcacctaact

SEQ ID NO: 500 - RNA, 27 nt, synthetic construct
  misc_feature 1..27: note = Description of Artificial Sequence: Synthetic oligonucleotide
  source 1..27: mol_type = other RNA
agttaggtgaaaaaggtgttctaaaat

SEQ ID NO: 501 - RNA, 25 nt, synthetic construct
  misc_feature 1..25: note = Description of Artificial Sequence: Synthetic oligonucleotide
  source 1..25: mol_type = other RNA
ttagaacacctttttcacctaacta

SEQ ID NO: 502 - RNA, 27 nt, synthetic construct
  misc_feature 1..27: note = Description of Artificial Sequence: Synthetic oligonucleotide
  source 1..27: mol_type = other RNA
tagttaggtgaaaaaggtgttctaaaa

SEQ ID NO: 503 - RNA, 25 nt, synthetic construct
  misc_feature 1..25: note = Description of Artificial Sequence: Synthetic oligonucleotide
  source 1..25: mol_type = other RNA
tagaacacctttttcacctaactaa

SEQ ID NO: 504 - RNA, 27 nt, synthetic construct
  misc_feature 1..27: note = Description of Artificial Sequence: Synthetic oligonucleotide
  source 1..27: mol_type = other RNA
ttagttaggtgaaaaaggtgttctaaa

SEQ ID NO: 505 - RNA, 25 nt, synthetic construct
  misc_feature 1..25: note = Description of Artificial Sequence: Synthetic oligonucleotide
  source 1..25: mol_type = other RNA
agaacacctttttcacctaactaaa

SEQ ID NO: 506 - RNA, 27 nt, synthetic construct
  misc_feature 1..27: note = Description of Artificial Sequence: Synthetic oligonucleotide
  source 1..27: mol_type = other RNA
tttagttaggtgaaaaaggtgttctaa

SEQ ID NO: 507 - RNA, 25 nt, synthetic construct
  misc_feature 1..25: note = Description of Artificial Sequence: Synthetic oligonucleotide
  source 1..25: mol_type = other RNA
gaacacctttttcacctaactaaaa

SEQ ID NO: 508 - RNA, 27 nt, synthetic construct
  misc_feature 1..27: note = Description of Artificial Sequence: Synthetic oligonucleotide
  source 1..27: mol_type = other RNA
ttttagttaggtgaaaaaggtgttcta

SEQ ID NO: 509 - RNA, 25 nt, synthetic construct
  misc_feature 1..25: note = Description of Artificial Sequence: Synthetic oligonucleotide
  source 1..25: mol_type = other RNA
aacacctttttcacctaactaaaat

SEQ ID NO: 510 - RNA, 27 nt, synthetic construct
  misc_feature 1..27: note = Description of Artificial Sequence: Synthetic oligonucleotide
  source 1..27: mol_type = other RNA
attttagttaggtgaaaaaggtgttct

SEQ ID NO: 511 - RNA, 25 nt, synthetic construct
  misc_feature 1..25: note = Description of Artificial Sequence: Synthetic oligonucleotide
  source 1..25: mol_type = other RNA
acacctttttcacctaactaaaata

SEQ ID NO: 512 - RNA, 27 nt, synthetic construct
  misc_feature 1..27: note = Description of Artificial Sequence: Synthetic oligonucleotide
  source 1..27: mol_type = other RNA
tattttagttaggtgaaaaaggtgttc

SEQ ID NO: 513 - RNA, 25 nt, synthetic construct
  misc_feature 1..25: note = Description of Artificial Sequence: Synthetic oligonucleotide
  source 1..25: mol_type = other RNA
cacctttttcacctaactaaaataa

SEQ ID NO: 514 - RNA, 27 nt, synthetic construct
  misc_feature 1..27: note = Description of Artificial Sequence: Synthetic oligonucleotide
  source 1..27: mol_type = other RNA
ttattttagttaggtgaaaaaggtgtt

SEQ ID NO: 515 - RNA, 25 nt, synthetic construct
  misc_feature 1..25: note = Description of Artificial Sequence: Synthetic oligonucleotide
  source 1..25: mol_type = other RNA
acctttttcacctaactaaaataat

SEQ ID NO: 516 - RNA, 27 nt, synthetic construct
  misc_feature 1..27: note = Description of Artificial Sequence: Synthetic oligonucleotide
  source 1..27: mol_type = other RNA
attattttagttaggtgaaaaaggtgt

SEQ ID NO: 517 - RNA, 25 nt, synthetic construct
  misc_feature 1..25: note = Description of Artificial Sequence: Synthetic oligonucleotide
  source 1..25: mol_type = other RNA
ctttttcacctaactaaaataatgt

SEQ ID NO: 518 - RNA, 27 nt, synthetic construct
  misc_feature 1..27: note = Description of Artificial Sequence: Synthetic oligonucleotide
  source 1..27: mol_type = other RNA
acattattttagttaggtgaaaaaggt

SEQ ID NO: 519 - RNA, 25 nt, synthetic construct
  misc_feature 1..25: note = Description of Artificial Sequence: Synthetic oligonucleotide
  source 1..25: mol_type = other RNA
ttttcacctaactaaaataatgttt

SEQ ID NO: 520 - RNA, 27 nt, synthetic construct
  misc_feature 1..27: note = Description of Artificial Sequence: Synthetic oligonucleotide
  source 1..27: mol_type = other RNA
aaacattattttagttaggtgaaaaag

SEQ ID NO: 521 - RNA, 25 nt, synthetic construct
  misc_feature 1..25: note = Description of Artificial Sequence: Synthetic oligonucleotide
  source 1..25: mol_type = other RNA
ttcacctaactaaaataatgtttaa

SEQ ID NO: 522 - RNA, 27 nt, synthetic construct
  misc_feature 1..27: note = Description of Artificial Sequence: Synthetic oligonucleotide
  source 1..27: mol_type = other RNA
ttaaacattattttagttaggtgaaaa

SEQ ID NO: 523 - RNA, 25 nt, synthetic construct
  misc_feature 1..25: note = Description of Artificial Sequence: Synthetic oligonucleotide
  source 1..25: mol_type = other RNA
tcacctaactaaaataatgtttaaa

SEQ ID NO: 524 - RNA, 27 nt, synthetic construct
  misc_feature 1..27: note = Description of Artificial Sequence: Synthetic oligonucleotide
  source 1..27: mol_type = other RNA
tttaaacattattttagttaggtgaaa

SEQ ID NO: 525 - RNA, 25 nt, synthetic construct
  misc_feature 1..25: note = Description of Artificial Sequence: Synthetic oligonucleotide
  source 1..25: mol_type = other RNA
cacctaactaaaataatgtttaaag

SEQ ID NO: 526 - RNA, 27 nt, synthetic construct
  misc_feature 1..27: note = Description of Artificial Sequence: Synthetic oligonucleotide
  source 1..27: mol_type = other RNA
ctttaaacattattttagttaggtgaa

SEQ ID NO: 527 - RNA, 25 nt, synthetic construct
  misc_feature 1..25: note = Description of Artificial Sequence: Synthetic oligonucleotide
  source 1..25: mol_type = other RNA
acctaactaaaataatgtttaaaga

SEQ ID NO: 528 - RNA, 27 nt, synthetic construct
  misc_feature 1..27: note = Description of Artificial Sequence: Synthetic oligonucleotide
  source 1..27: mol_type = other RNA
tctttaaacattattttagttaggtga

SEQ ID NO: 529 - RNA, 25 nt, synthetic construct
  misc_feature 1..25: note = Description of Artificial Sequence: Synthetic oligonucleotide
  source 1..25: mol_type = other RNA
cctaactaaaataatgtttaaagag

SEQ ID NO: 530 - RNA, 27 nt, synthetic construct
  misc_feature 1..27: note = Description of Artificial Sequence: Synthetic oligonucleotide
  source 1..27: mol_type = other RNA
ctctttaaacattattttagttaggtg

SEQ ID NO: 531 - RNA, 25 nt, synthetic construct
  misc_feature 1..25: note = Description of Artificial Sequence: Synthetic oligonucleotide
  source 1..25: mol_type = other RNA
ctaactaaaataatgtttaaagagt

SEQ ID NO: 532 - RNA, 27 nt, synthetic construct
  misc_feature 1..27: note = Description of Artificial Sequence: Synthetic oligonucleotide
  source 1..27: mol_type = other RNA
actctttaaacattattttagttaggt

SEQ ID NO: 533 - RNA, 25 nt, synthetic construct
  misc_feature 1..25: note = Description of Artificial Sequence: Synthetic oligonucleotide
  source 1..25: mol_type = other RNA
taactaaaataatgtttaaagagtt

SEQ ID NO: 534 - RNA, 27 nt, synthetic construct
  misc_feature 1..27: note = Description of Artificial Sequence: Synthetic oligonucleotide
  source 1..27: mol_type = other RNA
aactctttaaacattattttagttagg

SEQ ID NO: 535 - RNA, 25 nt, synthetic construct
  misc_feature 1..25: note = Description of Artificial Sequence: Synthetic oligonucleotide
  source 1..25: mol_type = other RNA
aactaaaataatgtttaaagagttt

SEQ ID NO: 536 - RNA, 27 nt, synthetic construct
  misc_feature 1..27: note = Description of Artificial Sequence: Synthetic oligonucleotide
  source 1..27: mol_type = other RNA
aaactctttaaacattattttagttag

SEQ ID NO: 537 - RNA, 25 nt, synthetic construct
  misc_feature 1..25: note = Description of Artificial Sequence: Synthetic oligonucleotide
  source 1..25: mol_type = other RNA
actaaaataatgtttaaagagtttt

SEQ ID NO: 538 - RNA, 27 nt, synthetic construct
  misc_feature 1..27: note = Description of Artificial Sequence: Synthetic oligonucleotide
  source 1..27: mol_type = other RNA
aaaactctttaaacattattttagtta

SEQ ID NO: 539 - RNA, 25 nt, synthetic construct
  misc_feature 1..25: note = Description of Artificial Sequence: Synthetic oligonucleotide
  source 1..25: mol_type = other RNA
ctaaaataatgtttaaagagttttg

SEQ ID NO: 540 - RNA, 27 nt, synthetic construct
  misc_feature 1..27: note = Description of Artificial Sequence: Synthetic oligonucleotide
  source 1..27: mol_type = other RNA
caaaactctttaaacattattttagtt

SEQ ID NO: 541 - RNA, 25 nt, synthetic construct
  misc_feature 1..25: note = Description of Artificial Sequence: Synthetic oligonucleotide
  source 1..25: mol_type = other RNA
taaaataatgtttaaagagttttgt

SEQ ID NO: 542 - RNA, 27 nt, synthetic construct
  misc_feature 1..27: note = Description of Artificial Sequence: Synthetic oligonucleotide
  source 1..27: mol_type = other RNA
acaaaactctttaaacattattttagt

SEQ ID NO: 543 - RNA, 25 nt, synthetic construct
  misc_feature 1..25: note = Description of Artificial Sequence: Synthetic oligonucleotide
  source 1..25: mol_type = other RNA
aagagttttgtataaaaatgtaagg

SEQ ID NO: 544 - RNA, 27 nt, synthetic construct
  misc_feature 1..27: note = Description of Artificial Sequence: Synthetic oligonucleotide
  source 1..27: mol_type = other RNA
ccttacatttttatacaaaactcttta

SEQ ID NO: 545 - RNA, 25 nt, synthetic construct
  misc_feature 1..25: note = Description of Artificial Sequence: Synthetic oligonucleotide
  source 1..25: mol_type = other RNA
gttttgtataaaaatgtaaggaagc

SEQ ID NO: 546 - RNA, 27 nt, synthetic construct
  misc_feature 1..27: note = Description of Artificial Sequence: Synthetic oligonucleotide
  source 1..27: mol_type = other RNA
gcttccttacatttttatacaaaactc

SEQ ID NO: 547 - RNA, 25 nt, synthetic construct
  misc_feature 1..25: note = Description of Artificial Sequence: Synthetic oligonucleotide
  source 1..25: mol_type = other RNA
ttttgtataaaaatgtaaggaagcg

SEQ ID NO: 548 - RNA, 27 nt, synthetic construct
  misc_feature 1..27: note = Description of Artificial Sequence: Synthetic oligonucleotide
  source 1..27: mol_type = other RNA
cgcttccttacatttttatacaaaact

SEQ ID NO: 549 - RNA, 25 nt, synthetic construct
  misc_feature 1..25: note = Description of Artificial Sequence: Synthetic oligonucleotide
  source 1..25: mol_type = other RNA
tttgtataaaaatgtaaggaagcgt

SEQ ID NO: 550 - RNA, 27 nt, synthetic construct
  misc_feature 1..27: note = Description of Artificial Sequence: Synthetic oligonucleotide
  source 1..27: mol_type = other RNA
acgcttccttacatttttatacaaaac

SEQ ID NO: 551 - RNA, 25 nt, synthetic construct
  misc_feature 1..25: note = Description of Artificial Sequence: Synthetic oligonucleotide
  source 1..25: mol_type = other RNA
ttgtataaaaatgtaaggaagcgtt

SEQ ID NO: 552 - RNA, 27 nt, synthetic construct
  misc_feature 1..27: note = Description of Artificial Sequence: Synthetic oligonucleotide
  source 1..27: mol_type = other RNA
aacgcttccttacatttttatacaaaa

SEQ ID NO: 553 - RNA, 25 nt, synthetic construct
  misc_feature 1..25: note = Description of Artificial Sequence: Synthetic oligonucleotide
  source 1..25: mol_type = other RNA
tgtataaaaatgtaaggaagcgttg

SEQ ID NO: 554 - RNA, 27 nt, synthetic construct
  misc_feature 1..27: note = Description of Artificial Sequence: Synthetic oligonucleotide
  source 1..27: mol_type = other RNA
caacgcttccttacatttttatacaaa

SEQ ID NO: 555 - RNA, 25 nt, synthetic construct
  misc_feature 1..25: note = Description of Artificial Sequence: Synthetic oligonucleotide
  source 1..25: mol_type = other RNA
gtataaaaatgtaaggaagcgttgt

SEQ ID NO: 556 - RNA, 27 nt, synthetic construct
  misc_feature 1..27: note = Description of Artificial Sequence: Synthetic oligonucleotide
  source 1..27: mol_type = other RNA
acaacgcttccttacatttttatacaa

SEQ ID NO: 557 - RNA, 25 nt, synthetic construct
  misc_feature 1..25: note = Description of Artificial Sequence: Synthetic oligonucleotide
  source 1..25: mol_type = other RNA
atgtaaggaagcgttgttacctgtt

SEQ ID NO: 558 - RNA, 27 nt, synthetic construct
  misc_feature 1..27: note = Description of Artificial Sequence: Synthetic oligonucleotide
  source 1..27: mol_type = other RNA
aacaggtaacaacgcttccttacattt

SEQ ID NO: 559 - RNA, 25 nt, synthetic construct
  misc_feature 1..25: note = Description of Artificial Sequence: Synthetic oligonucleotide
  source 1..25: mol_type = other RNA
ttttgtattatgtgaatcagtgaga

SEQ ID NO: 560 - RNA, 27 nt, synthetic construct
  misc_feature 1..27: note = Description of Artificial Sequence: Synthetic oligonucleotide
  source 1..27: mol_type = other RNA
tctcactgattcacataatacaaaatt

SEQ ID NO: 561 - RNA, 25 nt, synthetic construct
  misc_feature 1..25: note = Description of Artificial Sequence: Synthetic oligonucleotide
  source 1..25: mol_type = other RNA
tttgtattatgtgaatcagtgagat

SEQ ID NO: 562 - RNA, 27 nt, synthetic construct
  misc_feature 1..27: note = Description of Artificial Sequence: Synthetic oligonucleotide
  source 1..27: mol_type = other RNA
atctcactgattcacataatacaaaat

SEQ ID NO: 563 - RNA, 25 nt, synthetic construct
  misc_feature 1..25: note = Description of Artificial Sequence: Synthetic oligonucleotide
  source 1..25: mol_type = other RNA
ttgtattatgtgaatcagtgagatg

SEQ ID NO: 564 - RNA, 27 nt, synthetic construct
  misc_feature 1..27: note = Description of Artificial Sequence: Synthetic oligonucleotide
  source 1..27: mol_type = other RNA
catctcactgattcacataatacaaaa

SEQ ID NO: 565 - RNA, 25 nt, synthetic construct
  misc_feature 1..25: note = Description of Artificial Sequence: Synthetic oligonucleotide
  source 1..25: mol_type = other RNA
tgtattatgtgaatcagtgagatgt

SEQ ID NO: 566 - RNA, 27 nt, synthetic construct
  misc_feature 1..27: note = Description of Artificial Sequence: Synthetic oligonucleotide
  source 1..27: mol_type = other RNA
acatctcactgattcacataatacaaa

SEQ ID NO: 567 - RNA, 25 nt, synthetic construct
  misc_feature 1..25: note = Description of Artificial Sequence: Synthetic oligonucleotide
  source 1..25: mol_type = other RNA
gtattatgtgaatcagtgagatgtt

SEQ ID NO: 568 - RNA, 27 nt, synthetic construct
  misc_feature 1..27: note = Description of Artificial Sequence: Synthetic oligonucleotide
  source 1..27: mol_type = other RNA
aacatctcactgattcacataatacaa

SEQ ID NO: 569 - RNA, 25 nt, synthetic construct
  misc_feature 1..25: note = Description of Artificial Sequence: Synthetic oligonucleotide
  source 1..25: mol_type = other RNA
tattatgtgaatcagtgagatgtta

SEQ ID NO: 570 - RNA, 27 nt, synthetic construct
  misc_feature 1..27: note = Description of Artificial Sequence: Synthetic oligonucleotide
  source 1..27: mol_type = other RNA
taacatctcactgattcacataataca

SEQ ID NO: 571 - RNA, 25 nt, synthetic construct
  misc_feature 1..25: note = Description of Artificial Sequence: Synthetic oligonucleotide
  source 1..25: mol_type = other RNA
attatgtgaatcagtgagatgttag

SEQ ID NO: 572 - RNA, 27 nt, synthetic construct
  misc_feature 1..27: note = Description of Artificial Sequence: Synthetic oligonucleotide
  source 1..27: mol_type = other RNA
ctaacatctcactgattcacataatac

SEQ ID NO: 573 - RNA, 25 nt, synthetic construct
  misc_feature 1..25: note = Description of Artificial Sequence: Synthetic oligonucleotide
  source 1..25: mol_type = other RNA
ttatgtgaatcagtgagatgttagt

SEQ ID NO: 574 - RNA, 27 nt, synthetic construct
  misc_feature 1..27: note = Description of Artificial Sequence: Synthetic oligonucleotide
  source 1..27: mol_type = other RNA
actaacatctcactgattcacataata

SEQ ID NO: 575 - RNA, 25 nt, synthetic construct
  misc_feature 1..25: note = Description of Artificial Sequence: Synthetic oligonucleotide
  source 1..25: mol_type = other RNA
tatgtgaatcagtgagatgttagta

SEQ ID NO: 576 - RNA, 27 nt, synthetic construct
  misc_feature 1..27: note = Description of Artificial Sequence: Synthetic oligonucleotide
  source 1..27: mol_type = other RNA
tactaacatctcactgattcacataat

SEQ ID NO: 577 - RNA, 25 nt, synthetic construct
  misc_feature 1..25: note = Description of Artificial Sequence: Synthetic oligonucleotide
  source 1..25: mol_type = other RNA
atgtgaatcagtgagatgttagtag

SEQ ID NO: 578 - RNA, 27 nt, synthetic construct
  misc_feature 1..27: note = Description of Artificial Sequence: Synthetic oligonucleotide
  source 1..27: mol_type = other RNA
ctactaacatctcactgattcacataa

SEQ ID NO: 579 - RNA, 25 nt, synthetic construct
  misc_feature 1..25: note = Description of Artificial Sequence: Synthetic oligonucleotide
  source 1..25: mol_type = other RNA
tgtgaatcagtgagatgttagtaga

SEQ ID NO: 580 - RNA, 27 nt, synthetic construct
  misc_feature 1..27: note = Description of Artificial Sequence: Synthetic oligonucleotide
  source 1..27: mol_type = other RNA
tctactaacatctcactgattcacata

SEQ ID NO: 581 - RNA, 25 nt, synthetic construct
  misc_feature 1..25: note = Description of Artificial Sequence: Synthetic oligonucleotide
  source 1..25: mol_type = other RNA
gtgaatcagtgagatgttagtagaa

SEQ ID NO: 582 - RNA, 27 nt, synthetic construct
  misc_feature 1..27: note = Description of Artificial Sequence: Synthetic oligonucleotide
  source 1..27: mol_type = other RNA
ttctactaacatctcactgattcacat

SEQ ID NO: 583 - RNA, 25 nt, synthetic construct
  misc_feature 1..25: note = Description of Artificial Sequence: Synthetic oligonucleotide
  source 1..25: mol_type = other RNA
gtgagatgttagtagaataagcctt

SEQ ID NO: 584 - RNA, 27 nt, synthetic construct
  misc_feature 1..27: note = Description of Artificial Sequence: Synthetic oligonucleotide
  source 1..27: mol_type = other RNA
aaggcttattctactaacatctcactg

SEQ ID NO: 585 - RNA, 25 nt, synthetic construct
  misc_feature 1..25: note = Description of Artificial Sequence: Synthetic oligonucleotide
  source 1..25: mol_type = other RNA
ttttctatttatgcatttgagtaca

SEQ ID NO: 586 - RNA, 27 nt, synthetic construct
  misc_feature 1..27: note = Description of Artificial Sequence: Synthetic oligonucleotide
  source 1..27: mol_type = other RNA
tgtactcaaatgcataaatagaaaaaa

SEQ ID NO: 587 - RNA, 25 nt, synthetic construct
  misc_feature 1..25: note = Description of Artificial Sequence: Synthetic oligonucleotide
  source 1..25: mol_type = other RNA
tttctatttatgcatttgagtacag

SEQ ID NO: 588 - RNA, 27 nt, synthetic construct
  misc_feature 1..27: note = Description of Artificial Sequence: Synthetic oligonucleotide
  source 1..27: mol_type = other RNA
ctgtactcaaatgcataaatagaaaaa

SEQ ID NO: 589 - DNA, 25 bp, synthetic construct
  misc_feature 1..25: note = Description of Artificial Sequence: Synthetic oligonucleotide
  misc_feature 1..24: note = RNA
  misc_feature 25: note = DNA
  source 1..25: mol_type = other DNA
ttctatttatgcatttgagtacagt

SEQ ID NO: 590 - RNA, 27 nt, synthetic construct
  misc_feature 1..27: note = Description of Artificial Sequence: Synthetic oligonucleotide
  source 1..27: mol_type = other RNA
actgtactcaaatgcataaatagaaaa

SEQ ID NO: 591 - RNA, 25 nt, synthetic construct
  misc_feature 1..25: note = Description of Artificial Sequence: Synthetic oligonucleotide
  source 1..25: mol_type = other RNA
ctatttatgcatttgagtacagtac

SEQ ID NO: 592 - RNA, 27 nt, synthetic construct
  misc_feature 1..27: note = Description of Artificial Sequence: Synthetic oligonucleotide
  source 1..27: mol_type = other RNA
gtactgtactcaaatgcataaatagaa

SEQ ID NO: 593 - RNA, 25 nt, synthetic construct
  misc_feature 1..25: note = Description of Artificial Sequence: Synthetic oligonucleotide
  source 1..25: mol_type = other RNA
tgctcaaactgttaaatgttggaaa

SEQ ID NO: 594 - RNA, 27 nt, synthetic construct
  misc_feature 1..27: note = Description of Artificial Sequence: Synthetic oligonucleotide
  source 1..27: mol_type = other RNA
tttccaacatttaacagtttgagcaca

SEQ ID NO: 595 - RNA, 25 nt, synthetic construct
  misc_feature 1..25: note = Description of Artificial Sequence: Synthetic oligonucleotide
  source 1..25: mol_type = other RNA
gctcaaactgttaaatgttggaaaa

SEQ ID NO: 596 - RNA, 27 nt, synthetic construct
  misc_feature 1..27: note = Description of Artificial Sequence: Synthetic oligonucleotide
  source 1..27: mol_type = other RNA
ttttccaacatttaacagtttgagcac

SEQ ID NO: 597 - RNA, 25 nt, synthetic construct
  misc_feature 1..25: note = Description of Artificial Sequence: Synthetic oligonucleotide
  source 1..25: mol_type = other RNA
ctcaaactgttaaatgttggaaaag

SEQ ID NO: 598 - RNA, 27 nt, synthetic construct
  misc_feature 1..27: note = Description of Artificial Sequence: Synthetic oligonucleotide
  source 1..27: mol_type = other RNA
cttttccaacatttaacagtttgagca

SEQ ID NO: 599 - RNA, 25 nt, synthetic construct
  misc_feature 1..25: note = Description of Artificial Sequence: Synthetic oligonucleotide
  source 1..25: mol_type = other RNA
tcaaactgttaaatgttggaaaaga

SEQ ID NO: 600 - RNA, 27 nt, synthetic construct
  misc_feature 1..27: note = Description of Artificial Sequence: Synthetic oligonucleotide
  source 1..27: mol_type = other RNA
tcttttccaacatttaacagtttgagc

SEQ ID NO: 601 - RNA, 25 nt, synthetic construct
  misc_feature 1..25: note = Description of Artificial Sequence: Synthetic oligonucleotide
  source 1..25: mol_type = other RNA
caaactgttaaatgttggaaaagaa

SEQ ID NO: 602 - RNA, 27 nt, synthetic construct
  misc_feature 1..27: note = Description of Artificial Sequence: Synthetic oligonucleotide
  source 1..27: mol_type = other RNA
ttcttttccaacatttaacagtttgag

SEQ ID NO: 603 - RNA, 25 nt, synthetic construct
  misc_feature 1..25: note = Description of Artificial Sequence: Synthetic oligonucleotide
  source 1..25: mol_type = other RNA
aaactgttaaatgttggaaaagaaa

SEQ ID NO: 604 - RNA, 27 nt, synthetic construct
  misc_feature 1..27: note = Description of Artificial Sequence: Synthetic oligonucleotide
  source 1..27: mol_type = other RNA
tttcttttccaacatttaacagtttga

SEQ ID NO: 605 - RNA, 25 nt, synthetic construct
  misc_feature 1..25: note = Description of Artificial Sequence: Synthetic oligonucleotide
  source 1..25: mol_type = other RNA
aactgttaaatgttggaaaagaaag

SEQ ID NO: 606 - RNA, 27 nt, synthetic construct
  misc_feature 1..27: note = Description of Artificial Sequence: Synthetic oligonucleotide
  source 1..27: mol_type = other RNA
ctttcttttccaacatttaacagtttg

SEQ ID NO: 607 - RNA, 25 nt, synthetic construct
  misc_feature 1..25: note = Description of Artificial Sequence: Synthetic oligonucleotide
  source 1..25: mol_type = other RNA
actgttaaatgttggaaaagaaaga

SEQ ID NO: 608 - RNA, 27 nt, synthetic construct
  misc_feature 1..27: note = Description of Artificial Sequence: Synthetic oligonucleotide
  source 1..27: mol_type = other RNA
tctttcttttccaacatttaacagttt

SEQ ID NO: 609 - DNA, 25 bp, synthetic construct
  misc_feature 1..25: note = Description of Artificial Sequence: Synthetic oligonucleotide
  misc_feature 1..24: note = RNA
  misc_feature 25: note = DNA
  source 1..25: mol_type = other DNA
ctgttaaatgttggaaaagaaagat

SEQ ID NO: 610 - RNA, 27 nt, synthetic construct
  misc_feature 1..27: note = Description of Artificial Sequence: Synthetic oligonucleotide
  source 1..27: mol_type = other RNA
atctttcttttccaacatttaacagtt

SEQ ID NO: 611 - DNA, 25 bp, synthetic construct
  misc_feature 1..25: note = Description of Artificial Sequence: Synthetic oligonucleotide
  misc_feature 1..23: note = RNA
  misc_feature 24: note = DNA
  misc_feature 25: note = RNA
  source 1..25: mol_type = other DNA
tgttaaatgttggaaaagaaagata

SEQ ID NO: 612 - RNA, 27 nt, synthetic construct
  misc_feature 1..27: note = Description of Artificial Sequence: Synthetic oligonucleotide
  source 1..27: mol_type = other RNA
tatctttcttttccaacatttaacagt

SEQ ID NO: 613 - RNA, 25 nt, synthetic construct
  misc_feature 1..25: note = Description of Artificial Sequence: Synthetic oligonucleotide
  source 1..25: mol_type = other RNA
gttaaatgttggaaaagaaagatac

SEQ ID NO: 614 - RNA, 27 nt, synthetic construct
  misc_feature 1..27: note = Description of Artificial Sequence: Synthetic oligonucleotide
  source 1..27: mol_type = other RNA
gtatctttcttttccaacatttaacag

SEQ ID NO: 615 - RNA, 25 nt, synthetic construct
  misc_feature 1..25: note = Description of Artificial Sequence: Synthetic oligonucleotide
  source 1..25: mol_type = other RNA
ttaaatgttggaaaagaaagataca

SEQ ID NO: 616 - RNA, 27 nt, synthetic construct
  misc_feature 1..27: note = Description of Artificial Sequence: Synthetic oligonucleotide
  source 1..27: mol_type = other RNA
tgtatctttcttttccaacatttaaca

SEQ ID NO: 617 - RNA, 25 nt, synthetic construct
  misc_feature 1..25: note = Description of Artificial Sequence: Synthetic oligonucleotide
  source 1..25: mol_type = other RNA
taaatgttggaaaagaaagatacaa

SEQ ID NO: 618 - RNA, 27 nt, synthetic construct
  misc_feature 1..27: note = Description of Artificial Sequence: Synthetic oligonucleotide
  source 1..27: mol_type = other RNA
ttgtatctttcttttccaacatttaac

SEQ ID NO: 619 - DNA, 25 bp, synthetic construct
  misc_feature 1..25: note = Description of Artificial Sequence: Synthetic oligonucleotide
  misc_feature 1..24: note = RNA
  misc_feature 25: note = DNA
  source 1..25: mol_type = other DNA
gcacttgactgagaagacagaccct

SEQ ID NO: 620 - RNA, 27 nt, synthetic construct
  misc_feature 1..27: note = Description of Artificial Sequence: Synthetic oligonucleotide
  source 1..27: mol_type = other RNA
agggtctgtcttctcagtcaagtgctt

SEQ ID NO: 621 - DNA, 25 bp, synthetic construct
  misc_feature 1..25: note = Description of Artificial Sequence: Synthetic oligonucleotide
  misc_feature 1..24: note = RNA
  misc_feature 25: note = DNA
  source 1..25: mol_type = other DNA
gagaaaagaggctacttgtgaaaat

SEQ ID NO: 622 - RNA, 27 nt, synthetic construct
  misc_feature 1..27: note = Description of Artificial Sequence: Synthetic oligonucleotide
  source 1..27: mol_type = other RNA
attttcacaagtagcctcttttctcaa

SEQ ID NO: 623 - DNA, 25 bp, synthetic construct
  misc_feature 1..25: note = Description of Artificial Sequence: Synthetic oligonucleotide
  misc_feature 1..23: note = RNA
  misc_feature 24: note = DNA
  misc_feature 25: note = RNA
  source 1..25: mol_type = other DNA
agaaaagaggctacttgtgaaaata

SEQ ID NO: 624 - RNA, 27 nt, synthetic construct
  misc_feature 1..27: note = Description of Artificial Sequence: Synthetic oligonucleotide
  source 1..27: mol_type = other RNA
tattttcacaagtagcctcttttctca

SEQ ID NO: 625 - RNA, 25 nt, synthetic construct
  misc_feature 1..25: note = Description of Artificial Sequence: Synthetic oligonucleotide
  source 1..25: mol_type = other RNA
gaaaagaggctacttgtgaaaataa

SEQ ID NO: 626 - RNA, 27 nt, synthetic construct
  misc_feature 1..27: note = Description of Artificial Sequence: Synthetic oligonucleotide
  source 1..27: mol_type = other RNA
ttattttcacaagtagcctcttttctc

SEQ ID NO: 627 - DNA, 25 bp, synthetic construct
  misc_feature 1..25: note = Description of Artificial Sequence: Synthetic oligonucleotide
  misc_feature 1..24: note = RNA
  misc_feature 25: note = DNA
  source 1..25: mol_type = other DNA
aaaagaggctacttgtgaaaataat

SEQ ID NO: 628 - RNA, 27 nt, synthetic construct
  misc_feature 1..27: note = Description of Artificial Sequence: Synthetic oligonucleotide
  source 1..27: mol_type = other RNA
attattttcacaagtagcctcttttct

SEQ ID NO: 629 - DNA, 25 bp, synthetic construct
  misc_feature 1..25: note = Description of Artificial Sequence: Synthetic oligonucleotide
  misc_feature 1..23: note = RNA
  misc_feature 24: note = DNA
  misc_feature 25: note = RNA
  source 1..25: mol_type = other DNA
aaagaggctacttgtgaaaataatg

SEQ ID NO: 630 - RNA, 27 nt, synthetic construct
  misc_feature 1..27: note = Description of Artificial Sequence: Synthetic oligonucleotide
  source 1..27: mol_type = other RNA
cattattttcacaagtagcctcttttc

SEQ ID NO: 631 - RNA, 25 nt, synthetic construct
  misc_feature 1..25: note = Description of Artificial Sequence: Synthetic oligonucleotide
  source 1..25: mol_type = other RNA
aagaggctacttgtgaaaataatga

SEQ ID NO: 632 - RNA, 27 nt, synthetic construct
  misc_feature 1..27: note = Description of Artificial Sequence: Synthetic oligonucleotide
  source 1..27: mol_type = other RNA
tcattattttcacaagtagcctctttt

SEQ ID NO: 633 - RNA, 25 nt, synthetic construct
  misc_feature 1..25: note = Description of Artificial Sequence: Synthetic oligonucleotide
  source 1..25: mol_type = other RNA
agaggctacttgtgaaaataatgag

SEQ ID NO: 634 - RNA, 27 nt, synthetic construct
  misc_feature 1..27: note = Description of Artificial Sequence: Synthetic oligonucleotide
  source 1..27: mol_type = other RNA
ctcattattttcacaagtagcctcttt

SEQ ID NO: 635 - RNA, 25 nt, synthetic construct
  misc_feature 1..25: note = Description of Artificial Sequence: Synthetic oligonucleotide
  source 1..25: mol_type = other RNA
gaggctacttgtgaaaataatgagc

SEQ ID NO: 636 - RNA, 27 nt, synthetic construct
  misc_feature 1..27: note = Description of Artificial Sequence: Synthetic oligonucleotide
  source 1..27: mol_type = other RNA
gctcattattttcacaagtagcctctt

SEQ ID NO: 637 - RNA, 25 nt, synthetic construct
  misc_feature 1..25: note = Description of Artificial Sequence: Synthetic oligonucleotide
  source 1..25: mol_type = other RNA
ggctacttgtgaaaataatgagccc

SEQ ID NO: 638 - RNA, 27 nt, synthetic construct
  misc_feature 1..27: note = Description of Artificial Sequence: Synthetic oligonucleotide
  source 1..27: mol_type = other RNA
gggctcattattttcacaagtagcctc

SEQ ID NO: 639 - RNA, 25 nt, synthetic construct
  misc_feature 1..25: note = Description of Artificial Sequence: Synthetic oligonucleotide
  source 1..25: mol_type = other RNA
ctacttgtgaaaataatgagccccc

SEQ ID NO: 640 - RNA, 27 nt, synthetic construct
  misc_feature 1..27: note = Description of Artificial Sequence: Synthetic oligonucleotide
  source 1..27: mol_type = other RNA
gggggctcattattttcacaagtagcc

SEQ ID NO: 641 - RNA, 25 nt, synthetic construct
  misc_feature 1..25: note = Description of Artificial Sequence: Synthetic oligonucleotide
  source 1..25: mol_type = other RNA
tgaacctgccttcttacatcttgag

SEQ ID NO: 642 - RNA, 27 nt, synthetic construct
  misc_feature 1..27: note = Description of Artificial Sequence: Synthetic oligonucleotide
  source 1..27: mol_type = other RNA
ctcaagatgtaagaaggcaggttcaaa

SEQ ID NO: 643 - RNA, 25 nt, synthetic construct
  misc_feature 1..25: note = Description of Artificial Sequence: Synthetic oligonucleotide
  source 1..25: mol_type = other RNA
aaagttacaagtttcttttcccaag

SEQ ID NO: 644 - RNA, 27 nt, synthetic construct
  misc_feature 1..27: note = Description of Artificial Sequence: Synthetic oligonucleotide
  source 1..27: mol_type = other RNA
cttgggaaaagaaacttgtaactttcc

SEQ ID NO: 645 - DNA, 25 bp, synthetic construct
  misc_feature 1..25: note = Description of Artificial Sequence: Synthetic oligonucleotide
  misc_feature 1..24: note = RNA
  misc_feature 25: note = DNA
  source 1..25: mol_type = other DNA
aagttacaagtttcttttcccaagt

SEQ ID NO: 646 - RNA, 27 nt, synthetic construct
  misc_feature 1..27: note = Description of Artificial Sequence: Synthetic oligonucleotide
  source 1..27: mol_type = other RNA
acttgggaaaagaaacttgtaactttc

SEQ ID NO: 647 - DNA, 25 bp, synthetic construct
  misc_feature 1..25: note = Description of Artificial Sequence: Synthetic oligonucleotide
  misc_feature 1..23: note = RNA
  misc_feature 24..25: note = DNA
  source 1..25: mol_type = other DNA
agttacaagtttcttttcccaagtt

SEQ ID NO: 648 - RNA, 27 nt, synthetic construct
  misc_feature 1..27: note = Description of Artificial Sequence: Synthetic oligonucleotide
  source 1..27: mol_type = other RNA
aacttgggaaaagaaacttgtaacttt

SEQ ID NO: 649 - DNA, 25 bp, synthetic construct
  misc_feature 1..25: note = Description of Artificial Sequence: Synthetic oligonucleotide
  misc_feature 1..24: note = RNA
  misc_feature 25: note = DNA
  source 1..25: mol_type = other DNA
agtttcttttcccaagtttcccagt

SEQ ID NO: 650 - RNA, 27 nt, synthetic construct
  misc_feature 1..27: note = Description of Artificial Sequence: Synthetic oligonucleotide
  source 1..27: mol_type = other RNA
actgggaaacttgggaaaagaaacttg

SEQ ID NO: 651 - DNA, 25 bp, synthetic construct
  misc_feature 1..25: note = Description of Artificial Sequence: Synthetic oligonucleotide
  misc_feature 1..23: note = RNA
  misc_feature 24: note = DNA
  misc_feature 25: note = RNA
  source 1..25: mol_type = other DNA
caacagtattttctaataaccagta

SEQ ID NO: 652 - RNA, 27 nt, synthetic construct
  misc_feature 1..27: note = Description of Artificial Sequence: Synthetic oligonucleotide
  source 1..27: mol_type = other RNA
tactggttattagaaaatactgttggc

SEQ ID NO: 653 - DNA, 25 bp, synthetic construct
  misc_feature 1..25: note = Description of Artificial Sequence: Synthetic oligonucleotide
  misc_feature 1..24: note = RNA
  misc_feature 25: note = DNA
  source 1..25: mol_type = other DNA
aacagtattttctaataaccagtat

SEQ ID NO: 654 - RNA, 27 nt, synthetic construct
  misc_feature 1..27: note = Description of Artificial Sequence: Synthetic oligonucleotide
  source 1..27: mol_type = other RNA
atactggttattagaaaatactgttgg

SEQ ID NO: 655 - DNA, 25 bp, synthetic construct
  misc_feature 1..25: note = Description of Artificial Sequence: Synthetic oligonucleotide
  misc_feature 1..23: note = RNA
  misc_feature 24: note = DNA
  misc_feature 25: note = RNA
  source 1..25: mol_type = other DNA
acagtattttctaataaccagtata

SEQ ID NO: 656 - RNA, 27 nt, synthetic construct
  misc_feature 1..27: note = Description of Artificial Sequence: Synthetic oligonucleotide
  source 1..27: mol_type = other RNA
tatactggttattagaaaatactgttg

SEQ ID NO: 657 - DNA, 25 bp, synthetic construct
  misc_feature 1..25: note = Description of Artificial Sequence: Synthetic oligonucleotide
  misc_feature 1..24: note = RNA
  misc_feature 25: note = DNA
  source 1..25: mol_type = other DNA
cagtattttctaataaccagtatat

SEQ ID NO: 658 - RNA, 27 nt, synthetic construct
  misc_feature 1..27: note = Description of Artificial Sequence: Synthetic oligonucleotide
  source 1..27: mol_type = other RNA
atatactggttattagaaaatactgtt

SEQ ID NO: 659 - DNA, 25 bp, synthetic construct
  misc_feature 1..25: note = Description of Artificial Sequence: Synthetic oligonucleotide
  misc_feature 1..23: note = RNA
  misc_feature 24: note = DNA
  misc_feature 25: note = RNA
  source 1..25: mol_type = other DNA
ttgtgattgttatcaggaaaaaata

SEQ ID NO: 660 - RNA, 27 nt, synthetic construct
  misc_feature 1..27: note = Description of Artificial Sequence: Synthetic oligonucleotide
  source 1..27: mol_type = other RNA
tattttttcctgataacaatcacaata

SEQ ID NO: 661 - DNA, 25 bp, synthetic construct
  misc_feature 1..25: note = Description of Artificial Sequence: Synthetic oligonucleotide
  misc_feature 1..24: note = RNA
  misc_feature 25: note = DNA
  source 1..25: mol_type = other DNA
tgtgattgttatcaggaaaaaatat

SEQ ID NO: 662 - RNA, 27 nt, synthetic construct
  misc_feature 1..27: note = Description of Artificial Sequence: Synthetic oligonucleotide
  source 1..27: mol_type = other RNA
atattttttcctgataacaatcacaat

SEQ ID NO: 663 - DNA, 25 bp, synthetic construct
  misc_feature 1..25: note = Description of Artificial Sequence: Synthetic oligonucleotide
  misc_feature 1..23: note = RNA
  misc_feature 24: note = DNA
  misc_feature 25: note = RNA
  source 1..25: mol_type = other DNA
gtgattgttatcaggaaaaaatata

SEQ ID NO: 664 - RNA, 27 nt, synthetic construct
  misc_feature 1..27: note = Description of Artificial Sequence: Synthetic oligonucleotide
  source 1..27: mol_type = other RNA
tatattttttcctgataacaatcacaa

SEQ ID NO: 665 - DNA, 25 bp, synthetic construct
  misc_feature 1..25: note = Description of Artificial Sequence: Synthetic oligonucleotide
  misc_feature 1..24: note = RNA
  misc_feature 25: note = DNA
  source 1..25: mol_type = other DNA
tgattgttatcaggaaaaaatatat

SEQ ID NO: 666 - RNA, 27 nt, synthetic construct
  misc_feature 1..27: note = Description of Artificial Sequence: Synthetic oligonucleotide
  source 1..27: mol_type = other RNA
atatattttttcctgataacaatcaca

SEQ ID NO: 667 - DNA, 25 bp, synthetic construct
  misc_feature 1..25: note = Description of Artificial Sequence: Synthetic oligonucleotide
  misc_feature 1..23: note = RNA
  misc_feature 24..25: note = DNA
  source 1..25: mol_type = other DNA
gattgttatcaggaaaaaatatatt

SEQ ID NO: 668 - RNA, 27 nt, synthetic construct
  misc_feature 1..27: note = Description of Artificial Sequence: Synthetic oligonucleotide
  source 1..27: mol_type = other RNA
aatatattttttcctgataacaatcac

SEQ ID NO: 669 - DNA, 25 bp, synthetic construct
  misc_feature 1..25: note = Description of Artificial Sequence: Synthetic oligonucleotide
  misc_feature 1..23: note = RNA
  misc_feature 24: note = DNA
  misc_feature 25: note = RNA
  source 1..25: mol_type = other DNA
attgttatcaggaaaaaatatatta

SEQ ID NO: 670 - RNA, 27 nt, synthetic construct
  misc_feature 1..27: note = Description of Artificial Sequence: Synthetic oligonucleotide
  source 1..27: mol_type = other RNA
taatatattttttcctgataacaatca

SEQ ID NO: 671 - RNA, 25 nt, synthetic construct
  misc_feature 1..25: note = Description of Artificial Sequence: Synthetic oligonucleotide
  source 1..25: mol_type = other RNA
ttgttatcaggaaaaaatatattaa

SEQ ID NO: 672 - RNA, 27 nt, synthetic construct
  misc_feature 1..27: note = Description of Artificial Sequence: Synthetic oligonucleotide
  source 1..27: mol_type = other RNA
ttaatatattttttcctgataacaatc

SEQ ID NO: 673 - RNA, 25 nt, synthetic construct
  misc_feature 1..25: note = Description of Artificial Sequence: Synthetic oligonucleotide
  source 1..25: mol_type = other RNA
tgttatcaggaaaaaatatattaaa

SEQ ID NO: 674 - RNA, 27 nt, synthetic construct
  misc_feature 1..27: note = Description of Artificial Sequence: Synthetic oligonucleotide
  source 1..27: mol_type = other RNA
tttaatatattttttcctgataacaat

SEQ ID NO: 675 - DNA, 25 bp, synthetic construct
  misc_feature 1..25: note = Description of Artificial Sequence: Synthetic oligonucleotide
  misc_feature 1..24: note = RNA
  misc_feature 25: note = DNA
  source 1..25: mol_type = other DNA
gttatcaggaaaaaatatattaaat

SEQ ID NO: 676 - RNA, 27 nt, synthetic construct
  misc_feature 1..27: note = Description of Artificial Sequence: Synthetic oligonucleotide
  source 1..27: mol_type = other RNA
atttaatatattttttcctgataacaa

SEQ ID NO: 677 - DNA, 25 bp, synthetic construct
  misc_feature 1..25: note = Description of Artificial Sequence: Synthetic oligonucleotide
  misc_feature 1..23: note = RNA
  misc_feature 24: note = DNA
  misc_feature 25: note = RNA
  source 1..25: mol_type = other DNA
ttatcaggaaaaaatatattaaatg

SEQ ID NO: 678 - RNA, 27 nt, synthetic construct
  misc_feature 1..27: note = Description of Artificial Sequence: Synthetic oligonucleotide
  source 1..27: mol_type = other RNA
catttaatatattttttcctgataaca

SEQ ID NO: 679 - RNA, 25 nt, synthetic construct
  misc_feature 1..25: note = Description of Artificial Sequence: Synthetic oligonucleotide
  source 1..25: mol_type = other RNA
tatcaggaaaaaatatattaaatgg

SEQ ID NO: 680 - RNA, 27 nt, synthetic construct
  misc_feature 1..27: note = Description of Artificial Sequence: Synthetic oligonucleotide
  source 1..27: mol_type = other RNA
ccatttaatatattttttcctgataac

SEQ ID NO: 681 - RNA, 25 nt, synthetic construct
  misc_feature 1..25: note = Description of Artificial Sequence: Synthetic oligonucleotide
  source 1..25: mol_type = other RNA
atcaggaaaaaatatattaaatggc

SEQ ID NO: 682 - RNA, 27 nt, synthetic construct
  misc_feature 1..27: note = Description of Artificial Sequence: Synthetic oligonucleotide
  source 1..27: mol_type = other RNA
gccatttaatatattttttcctgataa

SEQ ID NO: 683 - RNA, 25 nt, synthetic construct
  misc_feature 1..25: note = Description of Artificial Sequence: Synthetic oligonucleotide
  source 1..25: mol_type = other RNA
aggaaaaaatatattaaatggctga

SEQ ID NO: 684 - RNA, 27 nt, synthetic construct
  misc_feature 1..27: note = Description of Artificial Sequence: Synthetic oligonucleotide
  source 1..27: mol_type = other RNA
tcagccatttaatatattttttcctga

SEQ ID NO: 685 - DNA, 25 bp, synthetic construct
  misc_feature 1..25: note = Description of Artificial Sequence: Synthetic oligonucleotide
  misc_feature 1..24: note = RNA
  misc_feature 25: note = DNA
  source 1..25: mol_type = other DNA
ggaaaaaatatattaaatggctgat

SEQ ID NO: 686 - RNA, 27 nt, synthetic construct
  misc_feature 1..27: note = Description of Artificial Sequence: Synthetic oligonucleotide
  source 1..27: mol_type = other RNA
atcagccatttaatatattttttcctg

SEQ ID NO: 687 - DNA, 25 bp, synthetic construct
  misc_feature 1..25: note = Description of Artificial Sequence: Synthetic oligonucleotide
  misc_feature 1..23: note = RNA
  misc_feature 24: note = DNA
  misc_feature 25: note = RNA
  source 1..25: mol_type = other DNA
gaaaaaatatattaaatggctgata

SEQ ID NO: 688 - RNA, 27 nt, synthetic construct
  misc_feature 1..27: note = Description of Artificial Sequence: Synthetic oligonucleotide
  source 1..27: mol_type = other RNA
tatcagccatttaatatattttttcct

SEQ ID NO: 689 - RNA, 25 nt, synthetic construct
  misc_feature 1..25: note = Description of Artificial Sequence: Synthetic oligonucleotide
  source 1..25: mol_type = other RNA
aaaaaatatattaaatggctgatag

SEQ ID NO: 690 - RNA, 27 nt, synthetic construct
  misc_feature 1..27: note = Description of Artificial Sequence: Synthetic oligonucleotide
  source 1..27: mol_type = other RNA
ctatcagccatttaatatattttttcc

SEQ ID NO: 691 - DNA, 25 bp, synthetic construct
  misc_feature 1..25: note = Description of Artificial Sequence: Synthetic oligonucleotide
  misc_feature 1..23: note = RNA
  misc_feature 24..25: note = DNA
  source 1..25: mol_type = other DNA
tattttctttctgcttttaaaaatt

SEQ ID NO: 692 - RNA, 27 nt, synthetic construct
  misc_feature 1..27: note = Description of Artificial Sequence: Synthetic oligonucleotide
  source 1..27: mol_type = other RNA
aatttttaaaagcagaaagaaaatacg

SEQ ID NO: 693 - DNA, 25 bp, synthetic construct
  misc_feature 1..25: note = Description of Artificial Sequence: Synthetic oligonucleotide
  misc_feature 1..23: note = RNA
  misc_feature 24: note = DNA
  misc_feature 25: note = RNA
  source 1..25: mol_type = other DNA
attttctttctgcttttaaaaatta

SEQ ID NO: 694 - RNA, 27 nt, synthetic construct
  misc_feature 1..27: note = Description of Artificial Sequence: Synthetic oligonucleotide
  source 1..27: mol_type = other RNA
taatttttaaaagcagaaagaaaatac

SEQ ID NO: 695 - RNA, 25 nt, synthetic construct
  misc_feature 1..25: note = Description of Artificial Sequence: Synthetic oligonucleotide
  source 1..25: mol_type = other RNA
tctttctgcttttaaaaattattca

SEQ ID NO: 696 - RNA, 27 nt, synthetic construct
  misc_feature 1..27: note = Description of Artificial Sequence: Synthetic oligonucleotide
  source 1..27: mol_type = other RNA
tgaataatttttaaaagcagaaagaaa

SEQ ID NO: 697 - RNA, 25 nt, synthetic construct
  misc_feature 1..25: note = Description of Artificial Sequence: Synthetic oligonucleotide
  source 1..25: mol_type = other RNA
ctttctgcttttaaaaattattcag

SEQ ID NO: 698 - RNA, 27 nt, synthetic construct
  misc_feature 1..27: note = Description of Artificial Sequence: Synthetic oligonucleotide
  source 1..27: mol_type = other RNA
ctgaataatttttaaaagcagaaagaa

SEQ ID NO: 699 - RNA, 25 nt, synthetic construct
  misc_feature 1..25: note = Description of Artificial Sequence: Synthetic oligonucleotide
  source 1..25: mol_type = other RNA
tttctgcttttaaaaattattcagg

SEQ ID NO: 700 - RNA, 27 nt, synthetic construct
  misc_feature 1..27: note = Description of Artificial Sequence: Synthetic oligonucleotide
  source 1..27: mol_type = other RNA
cctgaataatttttaaaagcagaaaga

SEQ ID NO: 701 - RNA, 25 nt, synthetic construct
  misc_feature 1..25: note = Description of Artificial Sequence: Synthetic oligonucleotide
  source 1..25: mol_type = other RNA
ctactaaaaacacaaaaattagcca

SEQ ID NO: 702 - RNA, 27 nt, synthetic construct
  misc_feature 1..27: note = Description of Artificial Sequence: Synthetic oligonucleotide
  source 1..27: mol_type = other RNA
tggctaatttttgtgtttttagtagag

SEQ ID NO: 703 - DNA, 25 bp, synthetic construct
  misc_feature 1..25: note = Description of Artificial Sequence: Synthetic oligonucleotide
  misc_feature 1..23: note = RNA
  misc_feature 24: note = DNA
  misc_feature 25: note = RNA
  source 1..25: mol_type = other DNA
caagataaggaaatcaggaagtgta

SEQ ID NO: 704 - RNA, 27 nt, synthetic construct
  misc_feature 1..27: note = Description of Artificial Sequence: Synthetic oligonucleotide
  source 1..27: mol_type = other RNA
tacacttcctgatttccttatcttgat

SEQ ID NO: 705 - RNA, 25 nt, synthetic construct
  misc_feature 1..25: note = Description of Artificial Sequence: Synthetic oligonucleotide
  source 1..25: mol_type = other RNA
aagataaggaaatcaggaagtgtaa

SEQ ID NO: 706 - RNA, 27 nt, synthetic construct
  misc_feature 1..27: note = Description of Artificial Sequence: Synthetic oligonucleotide
  source 1..27: mol_type = other RNA
ttacacttcctgatttccttatcttga

SEQ ID NO: 707 - DNA, 25 bp, synthetic construct
  misc_feature 1..25: note = Description of Artificial Sequence: Synthetic oligonucleotide
  misc_feature 1..24: note = RNA
  misc_feature 25: note = DNA
  source 1..25: mol_type = other DNA
agataaggaaatcaggaagtgtaat

SEQ ID NO: 708 - RNA, 27 nt, synthetic construct
  misc_feature 1..27: note = Description of Artificial Sequence: Synthetic oligonucleotide
  source 1..27: mol_type = other RNA
attacacttcctgatttccttatcttg

SEQ ID NO: 709 - DNA, 25 bp, synthetic construct
  misc_feature 1..25: note = Description of Artificial Sequence: Synthetic oligonucleotide
  misc_feature 1..23: note = RNA
  misc_feature 24: note = DNA
  misc_feature 25: note = RNA
  source 1..25: mol_type = other DNA
gataaggaaatcaggaagtgtaata

SEQ ID NO: 710 - RNA, 27 nt, synthetic construct
  misc_feature 1..27: note = Description of Artificial Sequence: Synthetic oligonucleotide
  source 1..27: mol_type = other RNA
tattacacttcctgatttccttatctt

SEQ ID NO: 711 - DNA, 25 bp, synthetic construct
  misc_feature 1..25: note = Description of Artificial Sequence: Synthetic oligonucleotide
  misc_feature 1..24: note = RNA
  misc_feature 25: note = DNA
  source 1..25: mol_type = other DNA
ataaggaaatcaggaagtgtaatat

SEQ ID NO: 712 - RNA, 27 nt, synthetic construct
  misc_feature 1..27: note = Description of Artificial Sequence: Synthetic oligonucleotide
  source 1..27: mol_type = other RNA
atattacacttcctgatttccttatct

SEQ ID NO: 713 - DNA, 25 bp, synthetic construct
  misc_feature 1..25: note = Description of Artificial Sequence: Synthetic oligonucleotide
  misc_feature 1..23: note = RNA
  misc_feature 24..25: note = DNA
  source 1..25: mol_type = other DNA
taaggaaatcaggaagtgtaatatt

SEQ ID NO: 714 - RNA, 27 nt, synthetic construct
  misc_feature 1..27: note = Description of Artificial Sequence: Synthetic oligonucleotide
  source 1..27: mol_type = other RNA
aatattacacttcctgatttccttatc

SEQ ID NO: 715 - DNA, 25 bp, synthetic construct
  misc_feature 1..25: note = Description of Artificial Sequence: Synthetic oligonucleotide
  misc_feature 1..23: note = RNA
  misc_feature 24: note = DNA
  misc_feature 25: note = RNA
  source 1..25: mol_type = other DNA
aaggaaatcaggaagtgtaatattc

SEQ ID NO: 716 - RNA, 27 nt, synthetic construct
  misc_feature 1..27: note = Description of Artificial Sequence: Synthetic oligonucleotide
  source 1..27: mol_type = other RNA
gaatattacacttcctgatttccttat

SEQ ID NO: 717 - DNA, 25 bp, synthetic construct
  misc_feature 1..25: note = Description of Artificial Sequence: Synthetic oligonucleotide
  misc_feature 1..24: note = RNA
  misc_feature 25: note = DNA
  source 1..25: mol_type = other DNA
aggaaatcaggaagtgtaatattct

SEQ ID NO: 718 - RNA, 27 nt, synthetic construct
  misc_feature 1..27: note = Description of Artificial Sequence: Synthetic oligonucleotide
  source 1..27: mol_type = other RNA
agaatattacacttcctgatttcctta

SEQ ID NO: 719 - DNA, 25 bp, synthetic construct
  misc_feature 1..25: note = Description of Artificial Sequence: Synthetic oligonucleotide
  misc_feature 1..23: note = RNA
  misc_feature 24..25: note = DNA
  source 1..25: mol_type = other DNA
ggaaatcaggaagtgtaatattctt

SEQ ID NO: 720 - RNA, 27 nt, synthetic construct
  misc_feature 1..27: note = Description of Artificial Sequence: Synthetic oligonucleotide
  source 1..27: mol_type = other RNA
aagaatattacacttcctgatttcctt

SEQ ID NO: 721 - DNA, 25 bp, synthetic construct
  misc_feature 1..25: note = Description of Artificial Sequence: Synthetic oligonucleotide
  misc_feature 1..23: note = RNA
  misc_feature 24: note = DNA
  misc_feature 25: note = RNA
  source 1..25: mol_type = other DNA
gaaatcaggaagtgtaatattctta

SEQ ID NO: 722 - RNA, 27 nt, synthetic construct
  misc_feature 1..27: note = Description of Artificial Sequence: Synthetic oligonucleotide
  source 1..27: mol_type = other RNA
taagaatattacacttcctgatttcct

SEQ ID NO: 723 - DNA, 25 bp, synthetic construct
  misc_feature 1..25: note = Description of Artificial Sequence: Synthetic oligonucleotide
  misc_feature 1..24: note = RNA
  misc_feature 25: note = DNA
  source 1..25: mol_type = other DNA
ctatgaatgcattcttatttcttct

SEQ ID NO: 724 - RNA, 27 nt, synthetic construct
  misc_feature 1..27: note = Description of Artificial Sequence: Synthetic oligonucleotide
  source 1..27: mol_type = other RNA
agaagaaataagaatgcattcataggc

SEQ ID NO: 725 - DNA, 25 bp, synthetic construct
  misc_feature 1..25: note = Description of Artificial Sequence: Synthetic oligonucleotide
  misc_feature 1..23: note = RNA
  misc_feature 24..25: note = DNA
  source 1..25: mol_type = other DNA
tatgaatgcattcttatttcttctt

SEQ ID NO: 726 - RNA, 27 nt, synthetic construct
  misc_feature 1..27: note = Description of Artificial Sequence: Synthetic oligonucleotide
  source 1..27: mol_type = other RNA
aagaagaaataagaatgcattcatagg

SEQ ID NO: 727 - DNA, 25 bp, synthetic construct
  misc_feature 1..25: note = Description of Artificial Sequence: Synthetic oligonucleotide
  misc_feature 1..23: note = RNA
  misc_feature 24..25: note = DNA
  source 1..25: mol_type = other DNA
ctaccacacccagctagtttttttt

SEQ ID NO: 728 - RNA, 27 nt, synthetic construct
  misc_feature 1..27: note = Description of Artificial Sequence: Synthetic oligonucleotide
  source 1..27: mol_type = other RNA
aaaaaaaactagctgggtgtggtagtg

SEQ ID NO: 729 - DNA, 25 bp, synthetic construct
  misc_feature 1..25: note = Description of Artificial Sequence: Synthetic oligonucleotide
  misc_feature 1..24: note = RNA
  misc_feature 25: note = DNA
  source 1..25: mol_type = other DNA
ccacacccagctagtttttttttgt

SEQ ID NO: 730 - RNA, 27 nt, synthetic construct
  misc_feature 1..27: note = Description of Artificial Sequence: Synthetic oligonucleotide
  source 1..27: mol_type = other RNA
acaaaaaaaaactagctgggtgtggta

SEQ ID NO: 731 - DNA, 25 bp, synthetic construct
  misc_feature 1..25: note = Description of Artificial Sequence: Synthetic oligonucleotide
  misc_feature 1..23: note = RNA
  misc_feature 24: note = DNA
  misc_feature 25: note = RNA
  source 1..25: mol_type = other DNA
cacacccagctagtttttttttgta

SEQ ID NO: 732 - RNA, 27 nt, synthetic construct
  misc_feature 1..27: note = Description of Artificial Sequence: Synthetic oligonucleotide
  source 1..27: mol_type = other RNA
tacaaaaaaaaactagctgggtgtggt

SEQ ID NO: 733 - RNA, 25 nt, synthetic construct
  misc_feature 1..25: note = Description of Artificial Sequence: Synthetic oligonucleotide
  source 1..25: mol_type = other RNA
gctaggattacaggtgtgagctacc

SEQ ID NO: 734 - RNA, 27 nt, synthetic construct
  misc_feature 1..27: note = Description of Artificial Sequence: Synthetic oligonucleotide
  source 1..27: mol_type = other RNA
ggtagctcacacctgtaatcctagcac

SEQ ID NO: 735 - RNA, 25 nt, synthetic construct
  misc_feature 1..25: note = Description of Artificial Sequence: Synthetic oligonucleotide
  source 1..25: mol_type = other RNA
ctaggattacaggtgtgagctacca

SEQ ID NO: 736 - RNA, 27 nt, synthetic construct
  misc_feature 1..27: note = Description of Artificial Sequence: Synthetic oligonucleotide
  source 1..27: mol_type = other RNA
tggtagctcacacctgtaatcctagca

SEQ ID NO: 737 - DNA, 25 bp, synthetic construct
  misc_feature 1..25: note = Description of Artificial Sequence: Synthetic oligonucleotide
  misc_feature 1..24: note = RNA
  misc_feature 25: note = DNA
  source 1..25: mol_type = other DNA
ccatgcctggtccaacattcttcat

SEQ ID NO: 738 - RNA, 27 nt, synthetic construct
  misc_feature 1..27: note = Description of Artificial Sequence: Synthetic oligonucleotide
  source 1..27: mol_type = other RNA
atgaagaatgttggaccaggcatggta

SEQ ID NO: 739 - DNA, 25 bp, synthetic construct
  misc_feature 1..25: note = Description of Artificial Sequence: Synthetic oligonucleotide
  misc_feature 1..23: note = RNA
  misc_feature 24..25: note = DNA
  source 1..25: mol_type = other DNA
tgcagagtatgagcctgattttgtt

SEQ ID NO: 740 - RNA, 27 nt, synthetic construct
  misc_feature 1..27: note = Description of Artificial Sequence: Synthetic oligonucleotide
  source 1..27: mol_type = other RNA
aacaaaatcaggctcatactctgcact

SEQ ID NO: 741 - DNA, 25 bp, synthetic construct
  misc_feature 1..25: note = Description of Artificial Sequence: Synthetic oligonucleotide
  misc_feature 1..23: note = RNA
  misc_feature 24..25: note = DNA
  source 1..25: mol_type = other DNA
gcagagtatgagcctgattttgttt

SEQ ID NO: 742 - RNA, 27 nt, synthetic construct
  misc_feature 1..27: note = Description of Artificial Sequence: Synthetic oligonucleotide
  source 1..27: mol_type = other RNA
aaacaaaatcaggctcatactctgcac

SEQ ID NO: 743 - DNA, 25 bp, synthetic construct
  misc_feature 1..25: note = Description of Artificial Sequence: Synthetic oligonucleotide
  misc_feature 1..23: note = RNA
  misc_feature 24: note = DNA
  misc_feature 25: note = RNA
  source 1..25: mol_type = other DNA
cagagtatgagcctgattttgttta

SEQ ID NO: 744 - RNA, 27 nt, synthetic construct
  misc_feature 1..27: note = Description of Artificial Sequence: Synthetic oligonucleotide
  source 1..27: mol_type = other RNA
taaacaaaatcaggctcatactctgca

SEQ ID NO: 745 - RNA, 25 nt, synthetic construct
  misc_feature 1..25: note = Description of Artificial Sequence: Synthetic oligonucleotide
  source 1..25: mol_type = other RNA
agagtatgagcctgattttgtttaa

SEQ ID NO: 746 - RNA, 27 nt, synthetic construct
  misc_feature 1..27: note = Description of Artificial Sequence: Synthetic oligonucleotide
  source 1..27: mol_type = other RNA
ttaaacaaaatcaggctcatactctgc

SEQ ID NO: 747 - RNA, 25 nt, synthetic construct
  misc_feature 1..25: note = Description of Artificial Sequence: Synthetic oligonucleotide
  source 1..25: mol_type = other RNA
gagtatgagcctgattttgtttaaa

SEQ ID NO: 748 - RNA, 27 nt, synthetic construct
  misc_feature 1..27: note = Description of Artificial Sequence: Synthetic oligonucleotide
  source 1..27: mol_type = other RNA
tttaaacaaaatcaggctcatactctg

SEQ ID NO: 749 - RNA, 25 nt, synthetic construct
  misc_feature 1..25: note = Description of Artificial Sequence: Synthetic oligonucleotide
  source 1..25: mol_type = other RNA
gggtgaaaccccatctctactaaaa

SEQ ID NO: 750 - RNA, 27 nt, synthetic construct
  misc_feature 1..27: note = Description of Artificial Sequence: Synthetic oligonucleotide
  source 1..27: mol_type = other RNA
ttttagtagagatggggtttcacccag

SEQ ID NO: 751 - RNA, 25 nt, synthetic construct
  misc_feature 1..25: note = Description of Artificial Sequence: Synthetic oligonucleotide
  source 1..25: mol_type = other RNA
gtgaaaccccatctctactaaaaaa

SEQ ID NO: 752 - RNA, 27 nt, synthetic construct
  misc_feature 1..27: note = Description of Artificial Sequence: Synthetic oligonucleotide
  source 1..27: mol_type = other RNA
ttttttagtagagatggggtttcaccc

SEQ ID NO: 753 - DNA, 25 bp, synthetic construct
  misc_feature 1..25: note = Description of Artificial Sequence: Synthetic oligonucleotide
  misc_feature 1..24: note = RNA
  misc_feature 25: note = DNA
  source 1..25: mol_type = other DNA
tgaaaccccatctctactaaaaaat

SEQ ID NO: 754 - RNA, 27 nt, synthetic construct
  misc_feature 1..27: note = Description of Artificial Sequence: Synthetic oligonucleotide
  source 1..27: mol_type = other RNA
attttttagtagagatggggtttcacc

SEQ ID NO: 755 - DNA, 25 bp, synthetic construct
  misc_feature 1..25: note = Description of Artificial Sequence: Synthetic oligonucleotide
  misc_feature 1..23: note = RNA
  misc_feature 24: note = DNA
  misc_feature 25: note = RNA
  source 1..25: mol_type = other DNA
gaaaccccatctctactaaaaaatg

SEQ ID NO: 756 - RNA, 27 nt, synthetic construct
  misc_feature 1..27: note = Description of Artificial Sequence: Synthetic oligonucleotide
  source 1..27: mol_type = other RNA
cattttttagtagagatggggtttcac

SEQ ID NO: 757 - RNA, 25 nt, synthetic construct
  misc_feature 1..25: note = Description of Artificial Sequence: Synthetic oligonucleotide
  source 1..25: mol_type = other RNA
aaaccccatctctactaaaaaatgc

SEQ ID NO: 758 - RNA, 27 nt, synthetic construct
  misc_feature 1..27: note = Description of Artificial Sequence: Synthetic oligonucleotide
  source 1..27: mol_type = other RNA
gcattttttagtagagatggggtttca

SEQ ID NO: 759 - RNA, 25 nt, synthetic construct
  misc_feature 1..25: note = Description of Artificial Sequence: Synthetic oligonucleotide
  source 1..25: mol_type = other RNA
aaccccatctctactaaaaaatgca

SEQ ID NO: 760 - RNA, 27 nt, synthetic construct
  misc_feature 1..27: note = Description of Artificial Sequence: Synthetic oligonucleotide
  source 1..27: mol_type = other RNA
tgcattttttagtagagatggggtttc

SEQ ID NO: 761 - RNA, 25 nt, synthetic construct
  misc_feature 1..25: note = Description of Artificial Sequence: Synthetic oligonucleotide
  source 1..25: mol_type = other RNA
cccatctctactaaaaaatgcaaaa

SEQ ID NO: 762 - RNA, 27 nt, synthetic construct
  misc_feature 1..27: note = Description of Artificial Sequence: Synthetic oligonucleotide
  source 1..27: mol_type = other RNA
ttttgcattttttagtagagatggggt

SEQ ID NO: 763 - DNA, 25 bp, synthetic construct
  misc_feature 1..25: note = Description of Artificial Sequence: Synthetic oligonucleotide
  misc_feature 1..23: note = RNA
  misc_feature 24..25: note = DNA
  source 1..25: mol_type = other DNA
atcaaaacccttatggcagactgtt

SEQ ID NO: 764 - RNA, 27 nt, synthetic construct
  misc_feature 1..27: note = Description of Artificial Sequence: Synthetic oligonucleotide
  source 1..27: mol_type = other RNA
aacagtctgccataagggttttgatat

SEQ ID NO: 765 - DNA, 25 bp, synthetic construct
  misc_feature 1..25: note = Description of Artificial Sequence: Synthetic oligonucleotide
  misc_feature 1..24: note = RNA
  misc_feature 25: note = DNA
  source 1..25: mol_type = other DNA
tattttatttgtcgtgcttatatgt

SEQ ID NO: 766 - RNA, 27 nt, synthetic construct
  misc_feature 1..27: note = Description of Artificial Sequence: Synthetic oligonucleotide
  source 1..27: mol_type = other RNA
acatataagcacgacaaataaaataca

SEQ ID NO: 767 - RNA, 25 nt, synthetic construct
  misc_feature 1..25: note = Description of Artificial Sequence: Synthetic oligonucleotide
  source 1..25: mol_type = other RNA
gtgttgcccaagtttctatggtgaa

SEQ ID NO: 768 - RNA, 27 nt, synthetic construct
  misc_feature 1..27: note = Description of Artificial Sequence: Synthetic oligonucleotide
  source 1..27: mol_type = other RNA
ttcaccatagaaacttgggcaacacat

SEQ ID NO: 769 - DNA, 25 bp, synthetic construct
  misc_feature 1..25: note = Description of Artificial Sequence: Synthetic oligonucleotide
  misc_feature 1..23: note = RNA
  misc_feature 24: note = DNA
  misc_feature 25: note = RNA
  source 1..25: mol_type = other DNA
gcccaagtttctatggtgaacggta

SEQ ID NO: 770 - RNA, 27 nt, synthetic construct
  misc_feature 1..27: note = Description of Artificial Sequence: Synthetic oligonucleotide
  source 1..27: mol_type = other RNA
taccgttcaccatagaaacttgggcaa

SEQ ID NO: 771 - DNA, 25 bp, synthetic construct
  misc_feature 1..25: note = Description of Artificial Sequence: Synthetic oligonucleotide
  misc_feature 1..24: note = RNA
  misc_feature 25: note = DNA
  source 1..25: mol_type = other DNA
cccaagtttctatggtgaacggtat

SEQ ID NO: 772 - RNA, 27 nt, synthetic construct
  misc_feature 1..27: note = Description of Artificial Sequence: Synthetic oligonucleotide
  source 1..27: mol_type = other RNA
ataccgttcaccatagaaacttgggca

SEQ ID NO: 773 - RNA, 25 nt, synthetic construct
  misc_feature 1..25: note = Description of Artificial Sequence: Synthetic oligonucleotide
  source 1..25: mol_type = other RNA
actttcagcatgagaaaataactcc

SEQ ID NO: 774 - RNA, 27 nt, synthetic construct
  misc_feature 1..27: note = Description of Artificial Sequence: Synthetic oligonucleotide
  source 1..27: mol_type = other RNA
ggagttattttctcatgctgaaagtga

SEQ ID NO: 775 - DNA, 25 bp, synthetic construct
  misc_feature 1..25: note = Description of Artificial Sequence: Synthetic oligonucleotide
  misc_feature 1..24: note = RNA
  misc_feature 25: note = DNA
  source 1..25: mol_type = other DNA
ctttcagcatgagaaaataactcct

SEQ ID NO: 776 - RNA, 27 nt, synthetic construct
  misc_feature 1..27: note = Description of Artificial Sequence: Synthetic oligonucleotide
  source 1..27: mol_type = other RNA
aggagttattttctcatgctgaaagtg

SEQ ID NO: 777 - RNA, 36 nt, synthetic construct
  misc_feature 1..36: note = Description of Artificial Sequence: Synthetic oligonucleotide
  source 1..36: mol_type = other RNA
tgagtgacaacgtacccttagcagccgaaaggctgc

SEQ ID NO: 778 - RNA, 22 nt, synthetic construct
  misc_feature 1..22: note = Description of Artificial Sequence: Synthetic oligonucleotide
  source 1..22: mol_type = other RNA
taagggtacgttgtcactcagg

SEQ ID NO: 779 - RNA, 36 nt, synthetic construct
  misc_feature 1..36: note = Description of Artificial Sequence: Synthetic oligonucleotide
  source 1..36: mol_type = other RNA
gagtgacaacgtacccttcagcagccgaaaggctgc

SEQ ID NO: 780 - RNA, 22 nt, synthetic construct
  misc_feature 1..22: note = Description of Artificial Sequence: Synthetic oligonucleotide
  source 1..22: mol_type = other RNA
tgaagggtacgttgtcactcgg

SEQ ID NO: 781 - RNA, 36 nt, synthetic construct
  misc_feature 1..36: note = Description of Artificial Sequence: Synthetic oligonucleotide
  source 1..36: mol_type = other RNA
agtgacaacgtacccttcaagcagccgaaaggctgc

SEQ ID NO: 782 - RNA, 22 nt, synthetic construct
  misc_feature 1..22: note = Description of Artificial Sequence: Synthetic oligonucleotide
  source 1..22: mol_type = other RNA
ttgaagggtacgttgtcactgg

SEQ ID NO: 783 - RNA, 36 nt, synthetic construct
  misc_feature 1..36: note = Description of Artificial Sequence: Synthetic oligonucleotide
  source 1..36: mol_type = other RNA
tgacaacgtacccttcattagcagccgaaaggctgc

SEQ ID NO: 784 - RNA, 22 nt, synthetic construct
  misc_feature 1..22: note = Description of Artificial Sequence: Synthetic oligonucleotide
  source 1..22: mol_type = other RNA
taatgaagggtacgttgtcagg

SEQ ID NO: 785 - RNA, 36 nt, synthetic construct
  misc_feature 1..36: note = Description of Artificial Sequence: Synthetic oligonucleotide
  source 1..36: mol_type = other RNA
gacaacgtacccttcattgagcagccgaaaggctgc

SEQ ID NO: 786 - RNA, 22 nt, synthetic construct
  misc_feature 1..22: note = Description of Artificial Sequence: Synthetic oligonucleotide
  source 1..22: mol_type = other RNA
tcaatgaagggtacgttgtcgg

SEQ ID NO: 787 - RNA, 36 nt, synthetic construct
  misc_feature 1..36: note = Description of Artificial Sequence: Synthetic oligonucleotide
  source 1..36: mol_type = other RNA
caacgtacccttcattgatagcagccgaaaggctgc

SEQ ID NO: 788 - RNA, 22 nt, synthetic construct
  misc_feature 1..22: note = Description of Artificial Sequence: Synthetic oligonucleotide
  source 1..22: mol_type = other RNA
tatcaatgaagggtacgttggg

SEQ ID NO: 789 - RNA, 36 nt, synthetic construct
  misc_feature 1..36: note = Description of Artificial Sequence: Synthetic oligonucleotide
  source 1..36: mol_type = other RNA
aacgtacccttcattgatgagcagccgaaaggctgc

SEQ ID NO: 790 - RNA, 22 nt, synthetic construct
  misc_feature 1..22: note = Description of Artificial Sequence: Synthetic oligonucleotide
  source 1..22: mol_type = other RNA
tcatcaatgaagggtacgttgg

SEQ ID NO: 791 - RNA, 36 nt, synthetic construct
  misc_feature 1..36: note = Description of Artificial Sequence: Synthetic oligonucleotide
  source 1..36: mol_type = other RNA
acgtacccttcattgatgcagcagccgaaaggctgc

SEQ ID NO: 792 - RNA, 22 nt, synthetic construct
  misc_feature 1..22: note = Description of Artificial Sequence: Synthetic oligonucleotide
  source 1..22: mol_type = other RNA
tgcatcaatgaagggtacgtgg

SEQ ID NO: 793 - RNA, 36 nt, synthetic construct
  misc_feature 1..36: note = Description of Artificial Sequence: Synthetic oligonucleotide
  source 1..36: mol_type = other RNA
cgtacccttcattgatgccagcagccgaaaggctgc

SEQ ID NO: 794 - RNA, 22 nt, synthetic construct
  misc_feature 1..22: note = Description of Artificial Sequence: Synthetic oligonucleotide
  source 1..22: mol_type = other RNA
tggcatcaatgaagggtacggg

SEQ ID NO: 795 - RNA, 36 nt, synthetic construct
  misc_feature 1..36: note = Description of Artificial Sequence: Synthetic oligonucleotide
  source 1..36: mol_type = other RNA
tacccttcattgatgccaaagcagccgaaaggctgc

SEQ ID NO: 796 - RNA, 22 nt, synthetic construct
  misc_feature 1..22: note = Description of Artificial Sequence: Synthetic oligonucleotide
  source 1..22: mol_type = other RNA
tttggcatcaatgaagggtagg

SEQ ID NO: 797 - RNA, 36 nt, synthetic construct
  misc_feature 1..36: note = Description of Artificial Sequence: Synthetic oligonucleotide
  source 1..36: mol_type = other RNA
cacgaactttcttcatgtgagcagccgaaaggctgc

SEQ ID NO: 798 - RNA, 22 nt, synthetic construct
  misc_feature 1..22: note = Description of Artificial Sequence: Synthetic oligonucleotide
  source 1..22: mol_type = other RNA
tcacatgaagaaagttcgtggg

SEQ ID NO: 799 - RNA, 36 nt, synthetic construct
  misc_feature 1..36: note = Description of Artificial Sequence: Synthetic oligonucleotide
  source 1..36: mol_type = other RNA
acgaactttcttcatgtggagcagccgaaaggctgc

SEQ ID NO: 800 - RNA, 22 nt, synthetic construct
  misc_feature 1..22: note = Description of Artificial Sequence: Synthetic oligonucleotide
  source 1..22: mol_type = other RNA
tccacatgaagaaagttcgtgg

SEQ ID NO: 801 - RNA, 36 nt, synthetic construct
  misc_feature 1..36: note = Description of Artificial Sequence: Synthetic oligonucleotide
  source 1..36: mol_type = other RNA
cgaactttcttcatgtggaagcagccgaaaggctgc

SEQ ID NO: 802 - RNA, 22 nt, synthetic construct
  misc_feature 1..22: note = Description of Artificial Sequence: Synthetic oligonucleotide
  source 1..22: mol_type = other RNA
ttccacatgaagaaagttcggg

SEQ ID NO: 803 - RNA, 36 nt, synthetic construct
  misc_feature 1..36: note = Description of Artificial Sequence: Synthetic oligonucleotide
  source 1..36: mol_type = other RNA
actttcttcatgtggacatagcagccgaaaggctgc

SEQ ID NO: 804 - RNA, 22 nt, synthetic construct
  misc_feature 1..22: note = Description of Artificial Sequence: Synthetic oligonucleotide
  source 1..22: mol_type = other RNA
tatgtccacatgaagaaagtgg

SEQ ID NO: 805 - RNA, 36 nt, synthetic construct
  misc_feature 1..36: note = Description of Artificial Sequence: Synthetic oligonucleotide
  source 1..36: mol_type = other RNA
tttcttcatgtggacatcaagcagccgaaaggctgc

SEQ ID NO: 806 - RNA, 22 nt, synthetic construct
  misc_feature 1..22: note = Description of Artificial Sequence: Synthetic oligonucleotide
  source 1..22: mol_type = other RNA
ttgatgtccacatgaagaaagg

SEQ ID NO: 807 - RNA, 36 nt, synthetic construct
  misc_feature 1..36: note = Description of Artificial Sequence: Synthetic oligonucleotide
  source 1..36: mol_type = other RNA
cttcatgtggacatcaccaagcagccgaaaggctgc

SEQ ID NO: 808 - RNA, 22 nt, synthetic construct
  misc_feature 1..22: note = Description of Artificial Sequence: Synthetic oligonucleotide
  source 1..22: mol_type = other RNA
ttggtgatgtccacatgaaggg

SEQ ID NO: 809 - RNA, 36 nt, synthetic construct
  misc_feature 1..36: note = Description of Artificial Sequence: Synthetic oligonucleotide
  source 1..36: mol_type = other RNA
atgtggacatcaccaagctagcagccgaaaggctgc

SEQ ID NO: 810 - RNA, 22 nt, synthetic construct
  misc_feature 1..22: note = Description of Artificial Sequence: Synthetic oligonucleotide
  source 1..22: mol_type = other RNA
tagcttggtgatgtccacatgg

SEQ ID NO: 811 - RNA, 36 nt, synthetic construct
  misc_feature 1..36: note = Description of Artificial Sequence: Synthetic oligonucleotide
  source 1..36: mol_type = other RNA
tgtggacatcaccaagctcagcagccgaaaggctgc

SEQ ID NO: 812 - RNA, 22 nt, synthetic construct
  misc_feature 1..22: note = Description of Artificial Sequence: Synthetic oligonucleotide
  source 1..22: mol_type = other RNA
tgagcttggtgatgtccacagg

SEQ ID NO: 813 - RNA, 36 nt, synthetic construct
  misc_feature 1..36: note = Description of Artificial Sequence: Synthetic oligonucleotide
  source 1..36: mol_type = other RNA
gtggacatcaccaagctcaagcagccgaaaggctgc

SEQ ID NO: 814 - RNA, 22 nt, synthetic construct
  misc_feature 1..22: note = Description of Artificial Sequence: Synthetic oligonucleotide
  source 1..22: mol_type = other RNA
ttgagcttggtgatgtccacgg

SEQ ID NO: 815 - RNA, 36 nt, synthetic construct
  misc_feature 1..36: note = Description of Artificial Sequence: Synthetic oligonucleotide
  source 1..36: mol_type = other RNA
tggacatcaccaagctcagagcagccgaaaggctgc

SEQ ID NO: 816 - RNA, 22 nt, synthetic construct
  misc_feature 1..22: note = Description of Artificial Sequence: Synthetic oligonucleotide
  source 1..22: mol_type = other RNA
tctgagcttggtgatgtccagg

SEQ ID NO: 817 - RNA, 36 nt, synthetic construct
  misc_feature 1..36: note = Description of Artificial Sequence: Synthetic oligonucleotide
  source 1..36: mol_type = other RNA
agatatgccttcgaggataagcagccgaaaggctgc

SEQ ID NO: 818 - RNA, 22 nt, synthetic construct
  misc_feature 1..22: note = Description of Artificial Sequence: Synthetic oligonucleotide
  source 1..22: mol_type = other RNA
ttatcctcgaaggcatatctgg

SEQ ID NO: 819 - RNA, 36 nt, synthetic construct
  misc_feature 1..36: note = Description of Artificial Sequence: Synthetic oligonucleotide
  source 1..36: mol_type = other RNA
atgccttcgaggatatttgagcagccgaaaggctgc

SEQ ID NO: 820 - RNA, 22 nt, synthetic construct
  misc_feature 1..22: note = Description of Artificial Sequence: Synthetic oligonucleotide
  source 1..22: mol_type = other RNA
tcaaatatcctcgaaggcatgg

SEQ ID NO: 821 - RNA, 36 nt, synthetic construct
  misc_feature 1..36: note = Description of Artificial Sequence: Synthetic oligonucleotide
  source 1..36: mol_type = other RNA
gccttcgaggatatttggaagcagccgaaaggctgc

SEQ ID NO: 822 - RNA, 22 nt, synthetic construct
  misc_feature 1..22: note = Description of Artificial Sequence: Synthetic oligonucleotide
  source 1..22: mol_type = other RNA
ttccaaatatcctcgaaggcgg

SEQ ID NO: 823 - RNA, 36 nt, synthetic construct
  misc_feature 1..36: note = Description of Artificial Sequence: Synthetic oligonucleotide
  source 1..36: mol_type = other RNA
tgaagtcatcctcagaaggagcagccgaaaggctgc

SEQ ID NO: 824 - RNA, 22 nt, synthetic construct
  misc_feature 1..22: note = Description of Artificial Sequence: Synthetic oligonucleotide
  source 1..22: mol_type = other RNA
tccttctgaggatgacttcagg

SEQ ID NO: 825 - RNA, 36 nt, synthetic construct
  misc_feature 1..36: note = Description of Artificial Sequence: Synthetic oligonucleotide
  source 1..36: mol_type = other RNA
gaagtcatcctcagaagggagcagccgaaaggctgc

SEQ ID NO: 826 - RNA, 22 nt, synthetic construct
  misc_feature 1..22: note = Description of Artificial Sequence: Synthetic oligonucleotide
  source 1..22: mol_type = other RNA
tcccttctgaggatgacttcgg

SEQ ID NO: 827 - RNA, 36 nt, synthetic construct
  misc_feature 1..36: note = Description of Artificial Sequence: Synthetic oligonucleotide
  source 1..36: mol_type = other RNA
atcctcagaagggatggatagcagccgaaaggctgc

SEQ ID NO: 828 - RNA, 22 nt, synthetic construct
  misc_feature 1..22: note = Description of Artificial Sequence: Synthetic oligonucleotide
  source 1..22: mol_type = other RNA
tatccatcccttctgaggatgg

SEQ ID NO: 829 - RNA, 36 nt, synthetic construct
  misc_feature 1..36: note = Description of Artificial Sequence: Synthetic oligonucleotide
  source 1..36: mol_type = other RNA
agtgaagaaatgaaagacaagcagccgaaaggctgc

SEQ ID NO: 830 - RNA, 22 nt, synthetic construct
  misc_feature 1..22: note = Description of Artificial Sequence: Synthetic oligonucleotide
  source 1..22: mol_type = other RNA
ttgtctttcatttcttcactgg

SEQ ID NO: 831 - RNA, 36 nt, synthetic construct
  misc_feature 1..36: note = Description of Artificial Sequence: Synthetic oligonucleotide
  source 1..36: mol_type = other RNA
aagaaatgaaagacaaaggagcagccgaaaggctgc

SEQ ID NO: 832 - RNA, 22 nt, synthetic construct
  misc_feature 1..22: note = Description of Artificial Sequence: Synthetic oligonucleotide
  source 1..22: mol_type = other RNA
tcctttgtctttcatttcttgg

SEQ ID NO: 833 - RNA, 36 nt, synthetic construct
  misc_feature 1..36: note = Description of Artificial Sequence: Synthetic oligonucleotide
  source 1..36: mol_type = other RNA
agaaatgaaagacaaaggtagcagccgaaaggctgc

SEQ ID NO: 834 - RNA, 22 nt, synthetic construct
  misc_feature 1..22: note = Description of Artificial Sequence: Synthetic oligonucleotide
  source 1..22: mol_type = other RNA
tacctttgtctttcatttctgg

SEQ ID NO: 835 - RNA, 36 nt, synthetic construct
  misc_feature 1..36: note = Description of Artificial Sequence: Synthetic oligonucleotide
  source 1..36: mol_type = other RNA
gaaatgaaagacaaaggtgagcagccgaaaggctgc

SEQ ID NO: 836 - RNA, 22 nt, synthetic construct
  misc_feature 1..22: note = Description of Artificial Sequence: Synthetic oligonucleotide
  source 1..22: mol_type = other RNA
tcacctttgtctttcatttcgg

SEQ ID NO: 837 - RNA, 36 nt, synthetic construct
  misc_feature 1..36: note = Description of Artificial Sequence: Synthetic oligonucleotide
  source 1..36: mol_type = other RNA
aaatgaaagacaaaggtggagcagccgaaaggctgc

SEQ ID NO: 838 - RNA, 22 nt, synthetic construct
  misc_feature 1..22: note = Description of Artificial Sequence: Synthetic oligonucleotide
  source 1..22: mol_type = other RNA
tccacctttgtctttcatttgg

SEQ ID NO: 839 - RNA, 36 nt, synthetic construct
  misc_feature 1..36: note = Description of Artificial Sequence: Synthetic oligonucleotide
  source 1..36: mol_type = other RNA
aatgaaagacaaaggtggaagcagccgaaaggctgc

SEQ ID NO: 840 - RNA, 22 nt, synthetic construct
  misc_feature 1..22: note = Description of Artificial Sequence: Synthetic oligonucleotide
  source 1..22: mol_type = other RNA
ttccacctttgtctttcattgg

SEQ ID NO: 841 - RNA, 36 nt, synthetic construct
  misc_feature 1..36: note = Description of Artificial Sequence: Synthetic oligonucleotide
  source 1..36: mol_type = other RNA
atgaaagacaaaggtggatagcagccgaaaggctgc

SEQ ID NO: 842 - RNA, 22 nt, synthetic construct
  misc_feature 1..22: note = Description of Artificial Sequence: Synthetic oligonucleotide
  source 1..22: mol_type = other RNA
tatccacctttgtctttcatgg

SEQ ID NO: 843 - RNA, 36 nt, synthetic construct
  misc_feature 1..36: note = Description of Artificial Sequence: Synthetic oligonucleotide
  source 1..36: mol_type = other RNA
tgaaagacaaaggtggataagcagccgaaaggctgc

SEQ ID NO: 844 - RNA, 22 nt, synthetic construct
  misc_feature 1..22: note = Description of Artificial Sequence: Synthetic oligonucleotide
  source 1..22: mol_type = other RNA
ttatccacctttgtctttcagg

SEQ ID NO: 845 - RNA, 36 nt, synthetic construct
  misc_feature 1..36: note = Description of Artificial Sequence: Synthetic oligonucleotide
  source 1..36: mol_type = other RNA
gaaagacaaaggtggatacagcagccgaaaggctgc

SEQ ID NO: 846 - RNA, 22 nt, synthetic construct
  misc_feature 1..22: note = Description of Artificial Sequence: Synthetic oligonucleotide
  source 1..22: mol_type = other RNA
tgtatccacctttgtctttcgg

SEQ ID NO: 847 - RNA, 36 nt, synthetic construct
  misc_feature 1..36: note = Description of Artificial Sequence: Synthetic oligonucleotide
  source 1..36: mol_type = other RNA
aagacaaaggtggatacatagcagccgaaaggctgc

SEQ ID NO: 848 - RNA, 22 nt, synthetic construct
  misc_feature 1..22: note = Description of Artificial Sequence: Synthetic oligonucleotide
  source 1..22: mol_type = other RNA
tatgtatccacctttgtcttgg

SEQ ID NO: 849 - RNA, 36 nt, synthetic construct
  misc_feature 1..36: note = Description of Artificial Sequence: Synthetic oligonucleotide
  source 1..36: mol_type = other RNA
agacaaaggtggatacatgagcagccgaaaggctgc

SEQ ID NO: 850 - RNA, 22 nt, synthetic construct
  misc_feature 1..22: note = Description of Artificial Sequence: Synthetic oligonucleotide
  source 1..22: mol_type = other RNA
tcatgtatccacctttgtctgg

SEQ ID NO: 851 - RNA, 36 nt, synthetic construct
  misc_feature 1..36: note = Description of Artificial Sequence: Synthetic oligonucleotide
  source 1..36: mol_type = other RNA
gacaaaggtggatacatgaagcagccgaaaggctgc

SEQ ID NO: 852 - RNA, 22 nt, synthetic construct
  misc_feature 1..22: note = Description of Artificial Sequence: Synthetic oligonucleotide
  source 1..22: mol_type = other RNA
ttcatgtatccacctttgtcgg

SEQ ID NO: 853 - RNA, 36 nt, synthetic construct
  misc_feature 1..36: note = Description of Artificial Sequence: Synthetic oligonucleotide
  source 1..36: mol_type = other RNA
acaaaggtggatacatgagagcagccgaaaggctgc

SEQ ID NO: 854 - RNA, 22 nt, synthetic construct
  misc_feature 1..22: note = Description of Artificial Sequence: Synthetic oligonucleotide
  source 1..22: mol_type = other RNA
tctcatgtatccacctttgtgg

SEQ ID NO: 855 - RNA, 36 nt, synthetic construct
  misc_feature 1..36: note = Description of Artificial Sequence: Synthetic oligonucleotide
  source 1..36: mol_type = other RNA
aaggtggatacatgagcaaagcagccgaaaggctgc

SEQ ID NO: 856 - RNA, 22 nt, synthetic construct
  misc_feature 1..22: note = Description of Artificial Sequence: Synthetic oligonucleotide
  source 1..22: mol_type = other RNA
tttgctcatgtatccaccttgg

SEQ ID NO: 857 - RNA, 36 nt, synthetic construct
  misc_feature 1..36: note = Description of Artificial Sequence: Synthetic oligonucleotide
  source 1..36: mol_type = other RNA
aggtggatacatgagcaagagcagccgaaaggctgc

SEQ ID NO: 858 - RNA, 22 nt, synthetic construct
  misc_feature 1..22: note = Description of Artificial Sequence: Synthetic oligonucleotide
  source 1..22: mol_type = other RNA
tcttgctcatgtatccacctgg

SEQ ID NO: 859 - RNA, 36 nt, synthetic construct
  misc_feature 1..36: note = Description of Artificial Sequence: Synthetic oligonucleotide
  source 1..36: mol_type = other RNA
tggatacatgagcaagattagcagccgaaaggctgc

SEQ ID NO: 860 - RNA, 22 nt, synthetic construct
  misc_feature 1..22: note = Description of Artificial Sequence: Synthetic oligonucleotide
  source 1..22: mol_type = other RNA
taatcttgctcatgtatccagg

SEQ ID NO: 861 - RNA, 36 nt, synthetic construct
  misc_feature 1..36: note = Description of Artificial Sequence: Synthetic oligonucleotide
  source 1..36: mol_type = other RNA
ggatacatgagcaagatttagcagccgaaaggctgc

SEQ ID NO: 862 - RNA, 22 nt, synthetic construct
  misc_feature 1..22: note = Description of Artificial Sequence: Synthetic oligonucleotide
  source 1..22: mol_type = other RNA
taaatcttgctcatgtatccgg

SEQ ID NO: 863 - RNA, 36 nt, synthetic construct
  misc_feature 1..36: note = Description of Artificial Sequence: Synthetic oligonucleotide
  source 1..36: mol_type = other RNA
gatacatgagcaagatttgagcagccgaaaggctgc

SEQ ID NO: 864 - RNA, 22 nt, synthetic construct
  misc_feature 1..22: note = Description of Artificial Sequence: Synthetic oligonucleotide
  source 1..22: mol_type = other RNA
tcaaatcttgctcatgtatcgg

SEQ ID NO: 865 - RNA, 36 nt, synthetic construct
  misc_feature 1..36: note = Description of Artificial Sequence: Synthetic oligonucleotide
  source 1..36: mol_type = other RNA
atacatgagcaagatttgcagcagccgaaaggctgc

SEQ ID NO: 866 - RNA, 22 nt, synthetic construct
  misc_feature 1..22: note = Description of Artificial Sequence: Synthetic oligonucleotide
  source 1..22: mol_type = other RNA
tgcaaatcttgctcatgtatgg

SEQ ID NO: 867 - RNA, 36 nt, synthetic construct
  misc_feature 1..36: note = Description of Artificial Sequence: Synthetic oligonucleotide
  source 1..36: mol_type = other RNA
tacatgagcaagatttgcaagcagccgaaaggctgc

SEQ ID NO: 868 - RNA, 22 nt, synthetic construct
  misc_feature 1..22: note = Description of Artificial Sequence: Synthetic oligonucleotide
  source 1..22: mol_type = other RNA
ttgcaaatcttgctcatgtagg

SEQ ID NO: 869 - RNA, 36 nt, synthetic construct
  misc_feature 1..36: note = Description of Artificial Sequence: Synthetic oligonucleotide
  source 1..36: mol_type = other RNA
acatgagcaagatttgcaaagcagccgaaaggctgc

SEQ ID NO: 870 - RNA, 22 nt, synthetic construct
  misc_feature 1..22: note = Description of Artificial Sequence: Synthetic oligonucleotide
  source 1..22: mol_type = other RNA
tttgcaaatcttgctcatgtgg

SEQ ID NO: 871 - RNA, 36 nt, synthetic construct
  misc_feature 1..36: note = Description of Artificial Sequence: Synthetic oligonucleotide
  source 1..36: mol_type = other RNA
tgagcaagatttgcaacttagcagccgaaaggctgc

SEQ ID NO: 872 - RNA, 22 nt, synthetic construct
  misc_feature 1..22: note = Description of Artificial Sequence: Synthetic oligonucleotide
  source 1..22: mol_type = other RNA
taagttgcaaatcttgctcagg

SEQ ID NO: 873 - RNA, 36 nt, synthetic construct
  misc_feature 1..36: note = Description of Artificial Sequence: Synthetic oligonucleotide
  source 1..36: mol_type = other RNA
gagcaagatttgcaacttgagcagccgaaaggctgc

SEQ ID NO: 874 - RNA, 22 nt, synthetic construct
  misc_feature 1..22: note = Description of Artificial Sequence: Synthetic oligonucleotide
  source 1..22: mol_type = other RNA
tcaagttgcaaatcttgctcgg

SEQ ID NO: 875 - RNA, 36 nt, synthetic construct
  misc_feature 1..36: note = Description of Artificial Sequence: Synthetic oligonucleotide
  source 1..36: mol_type = other RNA
agcaagatttgcaacttgcagcagccgaaaggctgc

SEQ ID NO: 876 - RNA, 22 nt, synthetic construct
  misc_feature 1..22: note = Description of Artificial Sequence: Synthetic oligonucleotide
  source 1..22: mol_type = other RNA
tgcaagttgcaaatcttgctgg

SEQ ID NO: 877 - RNA, 36 nt, synthetic construct
  misc_feature 1..36: note = Description of Artificial Sequence: Synthetic oligonucleotide
  source 1..36: mol_type = other RNA
gcaagatttgcaacttgctagcagccgaaaggctgc

SEQ ID NO: 878 - RNA, 22 nt, synthetic construct
  misc_feature 1..22: note = Description of Artificial Sequence: Synthetic oligonucleotide
  source 1..22: mol_type = other RNA
tagcaagttgcaaatcttgcgg

SEQ ID NO: 879 - RNA, 36 nt, synthetic construct
  misc_feature 1..36: note = Description of Artificial Sequence: Synthetic oligonucleotide
  source 1..36: mol_type = other RNA
caagatttgcaacttgctaagcagccgaaaggctgc

SEQ ID NO: 880 - RNA, 22 nt, synthetic construct
  misc_feature 1..22: note = Description of Artificial Sequence: Synthetic oligonucleotide
  source 1..22: mol_type = other RNA
ttagcaagttgcaaatcttggg

SEQ ID NO: 881 - RNA, 36 nt, synthetic construct
  misc_feature 1..36: note = Description of Artificial Sequence: Synthetic oligonucleotide
  source 1..36: mol_type = other RNA
aagatttgcaacttgctacagcagccgaaaggctgc

SEQ ID NO: 882 - RNA, 22 nt, synthetic construct
  misc_feature 1..22: note = Description of Artificial Sequence: Synthetic oligonucleotide
  source 1..22: mol_type = other RNA
tgtagcaagttgcaaatcttgg

SEQ ID NO: 883 - RNA, 36 nt, synthetic construct
  misc_feature 1..36: note = Description of Artificial Sequence: Synthetic oligonucleotide
  source 1..36: mol_type = other RNA
agatttgcaacttgctaccagcagccgaaaggctgc

SEQ ID NO: 884 - RNA, 22 nt, synthetic construct
  misc_feature 1..22: note = Description of Artificial Sequence: Synthetic oligonucleotide
  source 1..22: mol_type = other RNA
tggtagcaagttgcaaatctgg

SEQ ID NO: 885 - RNA, 36 nt, synthetic construct
  misc_feature 1..36: note = Description of Artificial Sequence: Synthetic oligonucleotide
  source 1..36: mol_type = other RNA
atttgcaacttgctacccaagcagccgaaaggctgc

SEQ ID NO: 886 - RNA, 22 nt, synthetic construct
  misc_feature 1..22: note = Description of Artificial Sequence: Synthetic oligonucleotide
  source 1..22: mol_type = other RNA
ttgggtagcaagttgcaaatgg

SEQ ID NO: 887 - RNA, 36 nt, synthetic construct
  misc_feature 1..36: note = Description of Artificial Sequence: Synthetic oligonucleotide
  source 1..36: mol_type = other RNA
ttgcaacttgctacccattagcagccgaaaggctgc

SEQ ID NO: 888 - RNA, 22 nt, synthetic construct
  misc_feature 1..22: note = Description of Artificial Sequence: Synthetic oligonucleotide
  source 1..22: mol_type = other RNA
taatgggtagcaagttgcaagg

SEQ ID NO: 889 - RNA, 36 nt, synthetic construct
  misc_feature 1..36: note = Description of Artificial Sequence: Synthetic oligonucleotide
  source 1..36: mol_type = other RNA
tgcaacttgctacccattaagcagccgaaaggctgc

SEQ ID NO: 890 - RNA, 22 nt, synthetic construct
  misc_feature 1..22: note = Description of Artificial Sequence: Synthetic oligonucleotide
  source 1..22: mol_type = other RNA
ttaatgggtagcaagttgcagg

SEQ ID NO: 891 - RNA, 36 nt, synthetic construct
  misc_feature 1..36: note = Description of Artificial Sequence: Synthetic oligonucleotide
  source 1..36: mol_type = other RNA
gcaacttgctacccattagagcagccgaaaggctgc

SEQ ID NO: 892 - RNA, 22 nt, synthetic construct
  misc_feature 1..22: note = Description of Artificial Sequence: Synthetic oligonucleotide
  source 1..22: mol_type = other RNA
tctaatgggtagcaagttgcgg

SEQ ID NO: 893 - RNA, 36 nt, synthetic construct
  misc_feature 1..36: note = Description of Artificial Sequence: Synthetic oligonucleotide
  source 1..36: mol_type = other RNA
caacttgctacccattaggagcagccgaaaggctgc

SEQ ID NO: 894 - RNA, 22 nt, synthetic construct
  misc_feature 1..22: note = Description of Artificial Sequence: Synthetic oligonucleotide
  source 1..22: mol_type = other RNA
tcctaatgggtagcaagttggg

SEQ ID NO: 895 - RNA, 36 nt, synthetic construct
  misc_feature 1..36: note = Description of Artificial Sequence: Synthetic oligonucleotide
  source 1..36: mol_type = other RNA
cttgctacccattaggataagcagccgaaaggctgc

SEQ ID NO: 896 - RNA, 22 nt, synthetic construct
  misc_feature 1..22: note = Description of Artificial Sequence: Synthetic oligonucleotide
  source 1..22: mol_type = other RNA
ttatcctaatgggtagcaaggg

SEQ ID NO: 897 - RNA, 36 nt, synthetic construct
  misc_feature 1..36: note = Description of Artificial Sequence: Synthetic oligonucleotide
  source 1..36: mol_type = other RNA
tgctacccattaggataatagcagccgaaaggctgc

SEQ ID NO: 898 - RNA, 22 nt, synthetic construct
  misc_feature 1..22: note = Description of Artificial Sequence: Synthetic oligonucleotide
  source 1..22: mol_type = other RNA
tattatcctaatgggtagcagg

SEQ ID NO: 899 - RNA, 36 nt, synthetic construct
  misc_feature 1..36: note = Description of Artificial Sequence: Synthetic oligonucleotide
  source 1..36: mol_type = other RNA
attaggataatgtcttatgagcagccgaaaggctgc

SEQ ID NO: 900 - RNA, 22 nt, synthetic construct
  misc_feature 1..22: note = Description of Artificial Sequence: Synthetic oligonucleotide
  source 1..22: mol_type = other RNA
tcataagacattatcctaatgg

SEQ ID NO: 901 - RNA, 36 nt, synthetic construct
  misc_feature 1..36: note = Description of Artificial Sequence: Synthetic oligonucleotide
  source 1..36: mol_type = other RNA
ttaggataatgtcttatgtagcagccgaaaggctgc

SEQ ID NO: 902 - RNA, 22 nt, synthetic construct
  misc_feature 1..22: note = Description of Artificial Sequence: Synthetic oligonucleotide
  source 1..22: mol_type = other RNA
tacataagacattatcctaagg

SEQ ID NO: 903 - RNA, 36 nt, synthetic construct
  misc_feature 1..36: note = Description of Artificial Sequence: Synthetic oligonucleotide
  source 1..36: mol_type = other RNA
tgcgattgtccagagactgagcagccgaaaggctgc

SEQ ID NO: 904 - RNA, 22 nt, synthetic construct
  misc_feature 1..22: note = Description of Artificial Sequence: Synthetic oligonucleotide
  source 1..22: mol_type = other RNA
tcagtctctggacaatcgcagg

SEQ ID NO: 905 - RNA, 36 nt, synthetic construct
  misc_feature 1..36: note = Description of Artificial Sequence: Synthetic oligonucleotide
  source 1..36: mol_type = other RNA
cgattgtccagagactggtagcagccgaaaggctgc

SEQ ID NO: 906 - RNA, 22 nt, synthetic construct
  misc_feature 1..22: note = Description of Artificial Sequence: Synthetic oligonucleotide
  source 1..22: mol_type = other RNA
taccagtctctggacaatcggg

SEQ ID NO: 907 - RNA, 36 nt, synthetic construct
  misc_feature 1..36: note = Description of Artificial Sequence: Synthetic oligonucleotide
  source 1..36: mol_type = other RNA
gtccagagactggtgacatagcagccgaaaggctgc

SEQ ID NO: 908 - RNA, 22 nt, synthetic construct
  misc_feature 1..22: note = Description of Artificial Sequence: Synthetic oligonucleotide
  source 1..22: mol_type = other RNA
tatgtcaccagtctctggacgg

SEQ ID NO: 909 - RNA, 36 nt, synthetic construct
  misc_feature 1..36: note = Description of Artificial Sequence: Synthetic oligonucleotide
  source 1..36: mol_type = other RNA
agagactggtgacatggctagcagccgaaaggctgc

SEQ ID NO: 910 - RNA, 22 nt, synthetic construct
  misc_feature 1..22: note = Description of Artificial Sequence: Synthetic oligonucleotide
  source 1..22: mol_type = other RNA
tagccatgtcaccagtctctgg

SEQ ID NO: 911 - RNA, 36 nt, synthetic construct
  misc_feature 1..36: note = Description of Artificial Sequence: Synthetic oligonucleotide
  source 1..36: mol_type = other RNA
actggtgacatggcttccaagcagccgaaaggctgc

SEQ ID NO: 912 - RNA, 22 nt, synthetic construct
  misc_feature 1..22: note = Description of Artificial Sequence: Synthetic oligonucleotide
  source 1..22: mol_type = other RNA
ttggaagccatgtcaccagtgg

SEQ ID NO: 913 - RNA, 36 nt, synthetic construct
  misc_feature 1..36: note = Description of Artificial Sequence: Synthetic oligonucleotide
  source 1..36: mol_type = other RNA
ctccacctttcccagttttagcagccgaaaggctgc

SEQ ID NO: 914 - RNA, 22 nt, synthetic construct
  misc_feature 1..22: note = Description of Artificial Sequence: Synthetic oligonucleotide
  source 1..22: mol_type = other RNA
taaaactgggaaaggtggaggg

SEQ ID NO: 915 - RNA, 36 nt, synthetic construct
  misc_feature 1..36: note = Description of Artificial Sequence: Synthetic oligonucleotide
  source 1..36: mol_type = other RNA
cacctttcccagtttttcaagcagccgaaaggctgc

SEQ ID NO: 916 - RNA, 22 nt, synthetic construct
  misc_feature 1..22: note = Description of Artificial Sequence: Synthetic oligonucleotide
  source 1..22: mol_type = other RNA
ttgaaaaactgggaaaggtggg

SEQ ID NO: 917 - RNA, 36 nt, synthetic construct
  misc_feature 1..36: note = Description of Artificial Sequence: Synthetic oligonucleotide
  source 1..36: mol_type = other RNA
agtttttcactagagaagaagcagccgaaaggctgc

SEQ ID NO: 918 - RNA, 22 nt, synthetic construct
  misc_feature 1..22: note = Description of Artificial Sequence: Synthetic oligonucleotide
  source 1..22: mol_type = other RNA
ttcttctctagtgaaaaactgg

SEQ ID NO: 919 - RNA, 36 nt, synthetic construct
  misc_feature 1..36: note = Description of Artificial Sequence: Synthetic oligonucleotide
  source 1..36: mol_type = other RNA
agcagattctttcagaggtagcagccgaaaggctgc

SEQ ID NO: 920 - RNA, 22 nt, synthetic construct
  misc_feature 1..22: note = Description of Artificial Sequence: Synthetic oligonucleotide
  source 1..22: mol_type = other RNA
tacctctgaaagaatctgctgg

SEQ ID NO: 921 - RNA, 36 nt, synthetic construct
  misc_feature 1..36: note = Description of Artificial Sequence: Synthetic oligonucleotide
  source 1..36: mol_type = other RNA
gcagattctttcagaggtgagcagccgaaaggctgc

SEQ ID NO: 922 - RNA, 22 nt, synthetic construct
  misc_feature 1..22: note = Description of Artificial Sequence: Synthetic oligonucleotide
  source 1..22: mol_type = other RNA
tcacctctgaaagaatctgcgg

SEQ ID NO: 923 - RNA, 36 nt, synthetic construct
  misc_feature 1..36: note = Description of Artificial Sequence: Synthetic oligonucleotide
  source 1..36: mol_type = other RNA
agattctttcagaggtgctagcagccgaaaggctgc

SEQ ID NO: 924 - RNA, 22 nt, synthetic construct
  misc_feature 1..22: note = Description of Artificial Sequence: Synthetic oligonucleotide
  source 1..22: mol_type = other RNA
tagcacctctgaaagaatctgg

SEQ ID NO: 925 - RNA, 36 nt, synthetic construct
  misc_feature 1..36: note = Description of Artificial Sequence: Synthetic oligonucleotide
  source 1..36: mol_type = other RNA
aggtgctaaagtttcccatagcagccgaaaggctgc

SEQ ID NO: 926 - RNA, 22 nt, synthetic construct
  misc_feature 1..22: note = Description of Artificial Sequence: Synthetic oligonucleotide
  source 1..22: mol_type = other RNA
tatgggaaactttagcacctgg

SEQ ID NO: 927 - RNA, 36 nt, synthetic construct
  misc_feature 1..36: note = Description of Artificial Sequence: Synthetic oligonucleotide
  source 1..36: mol_type = other RNA
aaagtttcccatctttgtgagcagccgaaaggctgc

SEQ ID NO: 928 - RNA, 22 nt, synthetic construct
  misc_feature 1..22: note = Description of Artificial Sequence: Synthetic oligonucleotide
  source 1..22: mol_type = other RNA
tcacaaagatgggaaactttgg

SEQ ID NO: 929 - RNA, 36 nt, synthetic construct
  misc_feature 1..36: note = Description of Artificial Sequence: Synthetic oligonucleotide
  source 1..36: mol_type = other RNA
agtttcccatctttgtgcaagcagccgaaaggctgc

SEQ ID NO: 930 - RNA, 22 nt, synthetic construct
  misc_feature 1..22: note = Description of Artificial Sequence: Synthetic oligonucleotide
  source 1..22: mol_type = other RNA
ttgcacaaagatgggaaactgg

SEQ ID NO: 931 - RNA, 36 nt, synthetic construct
  misc_feature 1..36: note = Description of Artificial Sequence: Synthetic oligonucleotide
  source 1..36: mol_type = other RNA
agcctctgagctgagttggagcagccgaaaggctgc

SEQ ID NO: 932 - RNA, 22 nt, synthetic construct
  misc_feature 1..22: note = Description of Artificial Sequence: Synthetic oligonucleotide
  source 1..22: mol_type = other RNA
tccaactcagctcagaggctgg

SEQ ID NO: 933 - RNA, 36 nt, synthetic construct
  misc_feature 1..36: note = Description of Artificial Sequence: Synthetic oligonucleotide
  source 1..36: mol_type = other RNA
gcctctgagctgagttggtagcagccgaaaggctgc

SEQ ID NO: 934 - RNA, 22 nt, synthetic construct
  misc_feature 1..22: note = Description of Artificial Sequence: Synthetic oligonucleotide
  source 1..22: mol_type = other RNA
taccaactcagctcagaggcgg

SEQ ID NO: 935 - RNA, 36 nt, synthetic construct
  misc_feature 1..36: note = Description of Artificial Sequence: Synthetic oligonucleotide
  source 1..36: mol_type = other RNA
cctctgagctgagttggttagcagccgaaaggctgc

SEQ ID NO: 936 - RNA, 22 nt, synthetic construct
  misc_feature 1..22: note = Description of Artificial Sequence: Synthetic oligonucleotide
  source 1..22: mol_type = other RNA
taaccaactcagctcagagggg

SEQ ID NO: 937 - RNA, 36 nt, synthetic construct
  misc_feature 1..36: note = Description of Artificial Sequence: Synthetic oligonucleotide
  source 1..36: mol_type = other RNA
ctctgagctgagttggtttagcagccgaaaggctgc

SEQ ID NO: 938 - RNA, 22 nt, synthetic construct
  misc_feature 1..22: note = Description of Artificial Sequence: Synthetic oligonucleotide
  source 1..22: mol_type = other RNA
taaaccaactcagctcagaggg

SEQ ID NO: 939 - RNA, 36 nt, synthetic construct
  misc_feature 1..36: note = Description of Artificial Sequence: Synthetic oligonucleotide
  source 1..36: mol_type = other RNA
tctgagctgagttggttttagcagccgaaaggctgc

SEQ ID NO: 940 - RNA, 22 nt, synthetic construct
  misc_feature 1..22: note = Description of Artificial Sequence: Synthetic oligonucleotide
  source 1..22: mol_type = other RNA
taaaaccaactcagctcagagg

SEQ ID NO: 941 - RNA, 36 nt, synthetic construct
  misc_feature 1..36: note = Description of Artificial Sequence: Synthetic oligonucleotide
  source 1..36: mol_type = other RNA
tgagctgagttggttttatagcagccgaaaggctgc

SEQ ID NO: 942 - RNA, 22 nt, synthetic construct
  misc_feature 1..22: note = Description of Artificial Sequence: Synthetic oligonucleotide
  source 1..22: mol_type = other RNA
tataaaaccaactcagctcagg

SEQ ID NO: 943 - RNA, 36 nt, synthetic construct
  misc_feature 1..36: note = Description of Artificial Sequence: Synthetic oligonucleotide
  source 1..36: mol_type = other RNA
tgagttggttttatgaaaaagcagccgaaaggctgc

SEQ ID NO: 944 - RNA, 22 nt, synthetic construct
  misc_feature 1..22: note = Description of Artificial Sequence: Synthetic oligonucleotide
  source 1..22: mol_type = other RNA
tttttcataaaaccaactcagg

SEQ ID NO: 945 - RNA, 36 nt, synthetic construct
  misc_feature 1..36: note = Description of Artificial Sequence: Synthetic oligonucleotide
  source 1..36: mol_type = other RNA
gagttggttttatgaaaagagcagccgaaaggctgc

SEQ ID NO: 946 - RNA, 22 nt, synthetic construct
  misc_feature 1..22: note = Description of Artificial Sequence: Synthetic oligonucleotide
  source 1..22: mol_type = other RNA
tcttttcataaaaccaactcgg

SEQ ID NO: 947 - RNA, 36 nt, synthetic construct
  misc_feature 1..36: note = Description of Artificial Sequence: Synthetic oligonucleotide
  source 1..36: mol_type = other RNA
ttggttttatgaaaagctaagcagccgaaaggctgc

SEQ ID NO: 948 - RNA, 22 nt, synthetic construct
  misc_feature 1..22: note = Description of Artificial Sequence: Synthetic oligonucleotide
  source 1..22: mol_type = other RNA
ttagcttttcataaaaccaagg

SEQ ID NO: 949 - RNA, 36 nt, synthetic construct
  misc_feature 1..36: note = Description of Artificial Sequence: Synthetic oligonucleotide
  source 1..36: mol_type = other RNA
tggttttatgaaaagctagagcagccgaaaggctgc

SEQ ID NO: 950 - RNA, 22 nt, synthetic construct
  misc_feature 1..22: note = Description of Artificial Sequence: Synthetic oligonucleotide
  source 1..22: mol_type = other RNA
tctagcttttcataaaaccagg

SEQ ID NO: 951 - RNA, 36 nt, synthetic construct
  misc_feature 1..36: note = Description of Artificial Sequence: Synthetic oligonucleotide
  source 1..36: mol_type = other RNA
ggttttatgaaaagctaggagcagccgaaaggctgc

SEQ ID NO: 952 - RNA, 22 nt, synthetic construct
  misc_feature 1..22: note = Description of Artificial Sequence: Synthetic oligonucleotide
  source 1..22: mol_type = other RNA
tcctagcttttcataaaaccgg

SEQ ID NO: 953 - RNA, 36 nt, synthetic construct
  misc_feature 1..36: note = Description of Artificial Sequence: Synthetic oligonucleotide
  source 1..36: mol_type = other RNA
ttttatgaaaagctaggaaagcagccgaaaggctgc

SEQ ID NO: 954 - RNA, 22 nt, synthetic construct
  misc_feature 1..22: note = Description of Artificial Sequence: Synthetic oligonucleotide
  source 1..22: mol_type = other RNA
tttcctagcttttcataaaagg

SEQ ID NO: 955 - RNA, 36 nt, synthetic construct
  misc_feature 1..36: note = Description of Artificial Sequence: Synthetic oligonucleotide
  source 1..36: mol_type = other RNA
tatgaaaagctaggaagcaagcagccgaaaggctgc

SEQ ID NO: 956 - RNA, 22 nt, synthetic construct
  misc_feature 1..22: note = Description of Artificial Sequence: Synthetic oligonucleotide
  source 1..22: mol_type = other RNA
ttgcttcctagcttttcatagg

SEQ ID NO: 957 - RNA, 36 nt, synthetic construct
  misc_feature 1..36: note = Description of Artificial Sequence: Synthetic oligonucleotide
  source 1..36: mol_type = other RNA
atgaaaagctaggaagcaaagcagccgaaaggctgc

SEQ ID NO: 958 - RNA, 22 nt, synthetic construct
  misc_feature 1..22: note = Description of Artificial Sequence: Synthetic oligonucleotide
  source 1..22: mol_type = other RNA
tttgcttcctagcttttcatgg

SEQ ID NO: 959 - RNA, 36 nt, synthetic construct
  misc_feature 1..36: note = Description of Artificial Sequence: Synthetic oligonucleotide
  source 1..36: mol_type = other RNA
ccagcacttaactctaataagcagccgaaaggctgc

SEQ ID NO: 960 - RNA, 22 nt, synthetic construct
  misc_feature 1..22: note = Description of Artificial Sequence: Synthetic oligonucleotide
  source 1..22: mol_type = other RNA
ttattagagttaagtgctgggg

SEQ ID NO: 961 - RNA, 36 nt, synthetic construct
  misc_feature 1..36: note = Description of Artificial Sequence: Synthetic oligonucleotide
  source 1..36: mol_type = other RNA
cagcacttaactctaatacagcagccgaaaggctgc

SEQ ID NO: 962 - RNA, 22 nt, synthetic construct
  misc_feature 1..22: note = Description of Artificial Sequence: Synthetic oligonucleotide
  source 1..22: mol_type = other RNA
tgtattagagttaagtgctggg

SEQ ID NO: 963 - RNA, 36 nt, synthetic construct
  misc_feature 1..36: note = Description of Artificial Sequence: Synthetic oligonucleotide
  source 1..36: mol_type = other RNA
taatacatcagcatgcgttagcagccgaaaggctgc

SEQ ID NO: 964 - RNA, 22 nt, synthetic construct
  misc_feature 1..22: note = Description of Artificial Sequence: Synthetic oligonucleotide
  source 1..22: mol_type = other RNA
taacgcatgctgatgtattagg

SEQ ID NO: 965 - RNA, 36 nt, synthetic construct
  misc_feature 1..36: note = Description of Artificial Sequence: Synthetic oligonucleotide
  source 1..36: mol_type = other RNA
aatacatcagcatgcgttaagcagccgaaaggctgc

SEQ ID NO: 966 - RNA, 22 nt, synthetic construct
  misc_feature 1..22: note = Description of Artificial Sequence: Synthetic oligonucleotide
  source 1..22: mol_type = other RNA
ttaacgcatgctgatgtattgg

SEQ ID NO: 967 - RNA, 36 nt, synthetic construct
  misc_feature 1..36: note = Description of Artificial Sequence: Synthetic oligonucleotide
  source 1..36: mol_type = other RNA
tgcgttaattcagctggttagcagccgaaaggctgc

SEQ ID NO: 968 - RNA, 22 nt, synthetic construct
  misc_feature 1..22: note = Description of Artificial Sequence: Synthetic oligonucleotide
  source 1..22: mol_type = other RNA
taaccagctgaattaacgcagg

SEQ ID NO: 969 - RNA, 36 nt, synthetic construct
  misc_feature 1..36: note = Description of Artificial Sequence: Synthetic oligonucleotide
  source 1..36: mol_type = other RNA
gcgttaattcagctggttgagcagccgaaaggctgc

SEQ ID NO: 970 - RNA, 22 nt, synthetic construct
  misc_feature 1..22: note = Description of Artificial Sequence: Synthetic oligonucleotide
  source 1..22: mol_type = other RNA
tcaaccagctgaattaacgcgg

SEQ ID NO: 971 - RNA, 36 nt, synthetic construct
  misc_feature 1..36: note = Description of Artificial Sequence: Synthetic oligonucleotide
  source 1..36: mol_type = other RNA
cgttaattcagctggttggagcagccgaaaggctgc

SEQ ID NO: 972 - RNA, 22 nt, synthetic construct
  misc_feature 1..22: note = Description of Artificial Sequence: Synthetic oligonucleotide
  source 1..22: mol_type = other RNA
tccaaccagctgaattaacggg

SEQ ID NO: 973 - RNA, 36 nt, synthetic construct
  misc_feature 1..36: note = Description of Artificial Sequence: Synthetic oligonucleotide
  source 1..36: mol_type = other RNA
ttaattcagctggttgggaagcagccgaaaggctgc

SEQ ID NO: 974 - RNA, 22 nt, synthetic construct
  misc_feature 1..22: note = Description of Artificial Sequence: Synthetic oligonucleotide
  source 1..22: mol_type = other RNA
ttcccaaccagctgaattaagg

SEQ ID NO: 975 - RNA, 36 nt, synthetic construct
  misc_feature 1..36: note = Description of Artificial Sequence: Synthetic oligonucleotide
  source 1..36: mol_type = other RNA
taattcagctggttgggaaagcagccgaaaggctgc

SEQ ID NO: 976 - RNA, 22 nt, synthetic construct
  misc_feature 1..22: note = Description of Artificial Sequence: Synthetic oligonucleotide
  source 1..22: mol_type = other RNA
tttcccaaccagctgaattagg

SEQ ID NO: 977 - RNA, 36 nt, synthetic construct
  misc_feature 1..36: note = Description of Artificial Sequence: Synthetic oligonucleotide
  source 1..36: mol_type = other RNA
gcagagggtcccttactgaagcagccgaaaggctgc

SEQ ID NO: 978 - RNA, 22 nt, synthetic construct
  misc_feature 1..22: note = Description of Artificial Sequence: Synthetic oligonucleotide
  source 1..22: mol_type = other RNA
ttcagtaagggaccctctgcgg

SEQ ID NO: 979 - RNA, 36 nt, synthetic construct
  misc_feature 1..36: note = Description of Artificial Sequence: Synthetic oligonucleotide
  source 1..36: mol_type = other RNA
ctattaatggtcagactgtagcagccgaaaggctgc

SEQ ID NO: 980 - RNA, 22 nt, synthetic construct
  misc_feature 1..22: note = Description of Artificial Sequence: Synthetic oligonucleotide
  source 1..22: mol_type = other RNA
tacagtctgaccattaataggg

SEQ ID NO: 981 - RNA, 36 nt, synthetic construct
  misc_feature 1..36: note = Description of Artificial Sequence: Synthetic oligonucleotide
  source 1..36: mol_type = other RNA
tattaatggtcagactgttagcagccgaaaggctgc

SEQ ID NO: 982 - RNA, 22 nt, synthetic construct
  misc_feature 1..22: note = Description of Artificial Sequence: Synthetic oligonucleotide
  source 1..22: mol_type = other RNA
taacagtctgaccattaatagg

SEQ ID NO: 983 - RNA, 36 nt, synthetic construct
  misc_feature 1..36: note = Description of Artificial Sequence: Synthetic oligonucleotide
  source 1..36: mol_type = other RNA
attaatggtcagactgttcagcagccgaaaggctgc

SEQ ID NO: 984 - RNA, 22 nt, synthetic construct
  misc_feature 1..22: note = Description of Artificial Sequence: Synthetic oligonucleotide
  source 1..22: mol_type = other RNA
tgaacagtctgaccattaatgg

SEQ ID NO: 985 - RNA, 36 nt, synthetic construct
  misc_feature 1..36: note = Description of Artificial Sequence: Synthetic oligonucleotide
  source 1..36: mol_type = other RNA
ttaatggtcagactgttccagcagccgaaaggctgc

SEQ ID NO: 986 - RNA, 22 nt, synthetic construct
  misc_feature 1..22: note = Description of Artificial Sequence: Synthetic oligonucleotide
  source 1..22: mol_type = other RNA
tggaacagtctgaccattaagg

SEQ ID NO: 987 - RNA, 36 nt, synthetic construct
  misc_feature 1..36: note = Description of Artificial Sequence: Synthetic oligonucleotide
  source 1..36: mol_type = other RNA
taatggtcagactgttccaagcagccgaaaggctgc

SEQ ID NO: 988 - RNA, 22 nt, synthetic construct
  misc_feature 1..22: note = Description of Artificial Sequence: Synthetic oligonucleotide
  source 1..22: mol_type = other RNA
ttggaacagtctgaccattagg

SEQ ID NO: 989 - RNA, 36 nt, synthetic construct
  misc_feature 1..36: note = Description of Artificial Sequence: Synthetic oligonucleotide
  source 1..36: mol_type = other RNA
aatggtcagactgttccagagcagccgaaaggctgc

SEQ ID NO: 990 - RNA, 22 nt, synthetic construct
  misc_feature 1..22: note = Description of Artificial Sequence: Synthetic oligonucleotide
  source 1..22: mol_type = other RNA
tctggaacagtctgaccattgg

SEQ ID NO: 991 - RNA, 36 nt, synthetic construct
  misc_feature 1..36: note = Description of Artificial Sequence: Synthetic oligonucleotide
  source 1..36: mol_type = other RNA
agaacacctttttcacctaagcagccgaaaggctgc

SEQ ID NO: 992 - RNA, 22 nt, synthetic construct
  misc_feature 1..22: note = Description of Artificial Sequence: Synthetic oligonucleotide
  source 1..22: mol_type = other RNA
ttaggtgaaaaaggtgttctgg

SEQ ID NO: 993 - RNA, 36 nt, synthetic construct
  misc_feature 1..36: note = Description of Artificial Sequence: Synthetic oligonucleotide
  source 1..36: mol_type = other RNA
gaacacctttttcacctaaagcagccgaaaggctgc

SEQ ID NO: 994 - RNA, 22 nt, synthetic construct
  misc_feature 1..22: note = Description of Artificial Sequence: Synthetic oligonucleotide
  source 1..22: mol_type = other RNA
tttaggtgaaaaaggtgttcgg

SEQ ID NO: 995 - RNA, 36 nt, synthetic construct
  misc_feature 1..36: note = Description of Artificial Sequence: Synthetic oligonucleotide
  source 1..36: mol_type = other RNA
aacacctttttcacctaacagcagccgaaaggctgc

SEQ ID NO: 996 - RNA, 22 nt, synthetic construct
  misc_feature 1..22: note = Description of Artificial Sequence: Synthetic oligonucleotide
  source 1..22: mol_type = other RNA
tgttaggtgaaaaaggtgttgg

SEQ ID NO: 997 - RNA, 36 nt, synthetic construct
  misc_feature 1..36: note = Description of Artificial Sequence: Synthetic oligonucleotide
  source 1..36: mol_type = other RNA
acacctttttcacctaactagcagccgaaaggctgc

SEQ ID NO: 998 - RNA, 22 nt, synthetic construct
  misc_feature 1..22: note = Description of Artificial Sequence: Synthetic oligonucleotide
  source 1..22: mol_type = other RNA
tagttaggtgaaaaaggtgtgg

SEQ ID NO: 999 - RNA, 36 nt, synthetic construct
  misc_feature 1..36: note = Description of Artificial Sequence: Synthetic oligonucleotide
  source 1..36: mol_type = other RNA
cacctttttcacctaactaagcagccgaaaggctgc

SEQ ID NO: 1000 - RNA, 22 nt, synthetic construct
  misc_feature 1..22: note = Description of Artificial Sequence: Synthetic oligonucleotide
  source 1..22: mol_type = other RNA
ttagttaggtgaaaaaggtggg

SEQ ID NO: 1001 - RNA, 36 nt, synthetic construct
  misc_feature 1..36: note = Description of Artificial Sequence: Synthetic oligonucleotide
  source 1..36: mol_type = other RNA
acctttttcacctaactaaagcagccgaaaggctgc

SEQ ID NO: 1002 - RNA, 22 nt, synthetic construct
  misc_feature 1..22: note = Description of Artificial Sequence: Synthetic oligonucleotide
  source 1..22: mol_type = other RNA
tttagttaggtgaaaaaggtgg

SEQ ID NO: 1003 - RNA, 36 nt, synthetic construct
  misc_feature 1..36: note = Description of Artificial Sequence: Synthetic oligonucleotide
  source 1..36: mol_type = other RNA
ctttttcacctaactaaaaagcagccgaaaggctgc

SEQ ID NO: 1004 - RNA, 22 nt, synthetic construct
  misc_feature 1..22: note = Description of Artificial Sequence: Synthetic oligonucleotide
  source 1..22: mol_type = other RNA
tttttagttaggtgaaaaaggg

SEQ ID NO: 1005 - RNA, 36 nt, synthetic construct
  misc_feature 1..36: note = Description of Artificial Sequence: Synthetic oligonucleotide
  source 1..36: mol_type = other RNA
ttttcacctaactaaaataagcagccgaaaggctgc

SEQ ID NO: 1006 - RNA, 22 nt, synthetic construct
  misc_feature 1..22: note = Description of Artificial Sequence: Synthetic oligonucleotide
  source 1..22: mol_type = other RNA
ttattttagttaggtgaaaagg

SEQ ID NO: 1007 - RNA, 36 nt, synthetic construct
  misc_feature 1..36: note = Description of Artificial Sequence: Synthetic oligonucleotide
  source 1..36: mol_type = other RNA
ttcacctaactaaaataatagcagccgaaaggctgc

SEQ ID NO: 1008 - RNA, 22 nt, synthetic construct
  misc_feature 1..22: note = Description of Artificial Sequence: Synthetic oligonucleotide
  source 1..22: mol_type = other RNA
tattattttagttaggtgaagg

SEQ ID NO: 1009 - RNA, 36 nt, synthetic construct
  misc_feature 1..36: note = Description of Artificial Sequence: Synthetic oligonucleotide
  source 1..36: mol_type = other RNA
tcacctaactaaaataatgagcagccgaaaggctgc

SEQ ID NO: 1010 - RNA, 22 nt, synthetic construct
  misc_feature 1..22: note = Description of Artificial Sequence: Synthetic oligonucleotide
  source 1..22: mol_type = other RNA
tcattattttagttaggtgagg

SEQ ID NO: 1011 - RNA, 36 nt, synthetic construct
  misc_feature 1..36: note = Description of Artificial Sequence: Synthetic oligonucleotide
  source 1..36: mol_type = other RNA
cacctaactaaaataatgtagcagccgaaaggctgc

SEQ ID NO: 1012 - RNA, 22 nt, synthetic construct
  misc_feature 1..22: note = Description of Artificial Sequence: Synthetic oligonucleotide
  source 1..22: mol_type = other RNA
tacattattttagttaggtggg

SEQ ID NO: 1013 - RNA, 36 nt, synthetic construct
  misc_feature 1..36: note = Description of Artificial Sequence: Synthetic oligonucleotide
  source 1..36: mol_type = other RNA
acctaactaaaataatgttagcagccgaaaggctgc

SEQ ID NO: 1014 - RNA, 22 nt, synthetic construct
  misc_feature 1..22: note = Description of Artificial Sequence: Synthetic oligonucleotide
  source 1..22: mol_type = other RNA
taacattattttagttaggtgg

SEQ ID NO: 1015 - RNA, 36 nt, synthetic construct
  misc_feature 1..36: note = Description of Artificial Sequence: Synthetic oligonucleotide
  source 1..36: mol_type = other RNA
cctaactaaaataatgtttagcagccgaaaggctgc

SEQ ID NO: 1016 - RNA, 22 nt, synthetic construct
  misc_feature 1..22: note = Description of Artificial Sequence: Synthetic oligonucleotide
  source 1..22: mol_type = other RNA
taaacattattttagttagggg

SEQ ID NO: 1017 - RNA, 36 nt, synthetic construct
  misc_feature 1..36: note = Description of Artificial Sequence: Synthetic oligonucleotide
  source 1..36: mol_type = other RNA
ctaactaaaataatgtttaagcagccgaaaggctgc

SEQ ID NO: 1018 - RNA, 22 nt, synthetic construct
  misc_feature 1..22: note = Description of Artificial Sequence: Synthetic oligonucleotide
  source 1..22: mol_type = other RNA
ttaaacattattttagttaggg

SEQ ID NO: 1019 - RNA, 36 nt, synthetic construct
  misc_feature 1..36: note = Description of Artificial Sequence: Synthetic oligonucleotide
  source 1..36: mol_type = other RNA
taactaaaataatgtttaaagcagccgaaaggctgc

SEQ ID NO: 1020 - RNA, 22 nt, synthetic construct
  misc_feature 1..22: note = Description of Artificial Sequence: Synthetic oligonucleotide
  source 1..22: mol_type = other RNA
tttaaacattattttagttagg

SEQ ID NO: 1021 - RNA, 36 nt, synthetic construct
  misc_feature 1..36: note = Description of Artificial Sequence: Synthetic oligonucleotide
  source 1..36: mol_type = other RNA
aactaaaataatgtttaaaagcagccgaaaggctgc

SEQ ID NO: 1022 - RNA, 22 nt, synthetic construct
  misc_feature 1..22: note = Description of Artificial Sequence: Synthetic oligonucleotide
  source 1..22: mol_type = other RNA
ttttaaacattattttagttgg

SEQ ID NO: 1023 - RNA, 36 nt, synthetic construct
  misc_feature 1..36: note = Description of Artificial Sequence: Synthetic oligonucleotide
  source 1..36: mol_type = other RNA
actaaaataatgtttaaagagcagccgaaaggctgc

SEQ ID NO: 1024 - RNA, 22 nt, synthetic construct
  misc_feature 1..22: note = Description of Artificial Sequence: Synthetic oligonucleotide
  source 1..22: mol_type = other RNA
tctttaaacattattttagtgg

SEQ ID NO: 1025 - RNA, 36 nt, synthetic construct
  misc_feature 1..36: note = Description of Artificial Sequence: Synthetic oligonucleotide
  source 1..36: mol_type = other RNA
ctaaaataatgtttaaagaagcagccgaaaggctgc

SEQ ID NO: 1026 - RNA, 22 nt, synthetic construct
  misc_feature 1..22: note = Description of Artificial Sequence: Synthetic oligonucleotide
  source 1..22: mol_type = other RNA
ttctttaaacattattttaggg

SEQ ID NO: 1027 - RNA, 36 nt, synthetic construct
  misc_feature 1..36: note = Description of Artificial Sequence: Synthetic oligonucleotide
  source 1..36: mol_type = other RNA
taaaataatgtttaaagagagcagccgaaaggctgc

SEQ ID NO: 1028 - RNA, 22 nt, synthetic construct
  misc_feature 1..22: note = Description of Artificial Sequence: Synthetic oligonucleotide
  source 1..22: mol_type = other RNA
tctctttaaacattattttagg

SEQ ID NO: 1029 - RNA, 36 nt, synthetic construct
  misc_feature 1..36: note = Description of Artificial Sequence: Synthetic oligonucleotide
  source 1..36: mol_type = other RNA
aagagttttgtataaaaatagcagccgaaaggctgc

SEQ ID NO: 1030 - RNA, 22 nt, synthetic construct
  misc_feature 1..22: note = Description of Artificial Sequence: Synthetic oligonucleotide
  source 1..22: mol_type = other RNA
tatttttatacaaaactcttgg

SEQ ID NO: 1031 - RNA, 36 nt, synthetic construct
  misc_feature 1..36: note = Description of Artificial Sequence: Synthetic oligonucleotide
  source 1..36: mol_type = other RNA
gttttgtataaaaatgtaaagcagccgaaaggctgc

SEQ ID NO: 1032 - RNA, 22 nt, synthetic construct
  misc_feature 1..22: note = Description of Artificial Sequence: Synthetic oligonucleotide
  source 1..22: mol_type = other RNA
tttacatttttatacaaaacgg

SEQ ID NO: 1033 - RNA, 36 nt, synthetic construct
  misc_feature 1..36: note = Description of Artificial Sequence: Synthetic oligonucleotide
  source 1..36: mol_type = other RNA
ttgtataaaaatgtaaggaagcagccgaaaggctgc

SEQ ID NO: 1034 - RNA, 22 nt, synthetic construct
  misc_feature 1..22: note = Description of Artificial Sequence: Synthetic oligonucleotide
  source 1..22: mol_type = other RNA
ttccttacatttttatacaagg

SEQ ID NO: 1035 - RNA, 36 nt, synthetic construct
  misc_feature 1..36: note = Description of Artificial Sequence: Synthetic oligonucleotide
  source 1..36: mol_type = other RNA
tgtataaaaatgtaaggaaagcagccgaaaggctgc

SEQ ID NO: 1036 - RNA, 22 nt, synthetic construct
  misc_feature 1..22: note = Description of Artificial Sequence: Synthetic oligonucleotide
  source 1..22: mol_type = other RNA
tttccttacatttttatacagg

SEQ ID NO: 1037 - RNA, 36 nt, synthetic construct
  misc_feature 1..36: note = Description of Artificial Sequence: Synthetic oligonucleotide
  source 1..36: mol_type = other RNA
gtataaaaatgtaaggaagagcagccgaaaggctgc

SEQ ID NO: 1038 - RNA, 22 nt, synthetic construct
  misc_feature 1..22: note = Description of Artificial Sequence: Synthetic oligonucleotide
  source 1..22: mol_type = other RNA
tcttccttacatttttatacgg

SEQ ID NO: 1039 - RNA, 36 nt, synthetic construct
  misc_feature 1..36: note = Description of Artificial Sequence: Synthetic oligonucleotide
  source 1..36: mol_type = other RNA
atgtaaggaagcgttgttaagcagccgaaaggctgc

SEQ ID NO: 1040 - RNA, 22 nt, synthetic construct
  misc_feature 1..22: note = Description of Artificial Sequence: Synthetic oligonucleotide
  source 1..22: mol_type = other RNA
ttaacaacgcttccttacatgg

SEQ ID NO: 1041 - RNA, 36 nt, synthetic construct
  misc_feature 1..36: note = Description of Artificial Sequence: Synthetic oligonucleotide
  source 1..36: mol_type = other RNA
ttttgtattatgtgaatcaagcagccgaaaggctgc

SEQ ID NO: 1042 - RNA, 22 nt, synthetic construct
  misc_feature 1..22: note = Description of Artificial Sequence: Synthetic oligonucleotide
  source 1..22: mol_type = other RNA
ttgattcacataatacaaaagg

SEQ ID NO: 1043 - RNA, 36 nt, synthetic construct
  misc_feature 1..36: note = Description of Artificial Sequence: Synthetic oligonucleotide
  source 1..36: mol_type = other RNA
tttgtattatgtgaatcagagcagccgaaaggctgc

SEQ ID NO: 1044 - RNA, 22 nt, synthetic construct
  misc_feature 1..22: note = Description of Artificial Sequence: Synthetic oligonucleotide
  source 1..22: mol_type = other RNA
tctgattcacataatacaaagg

SEQ ID NO: 1045 - RNA, 36 nt, synthetic construct
  misc_feature 1..36: note = Description of Artificial Sequence: Synthetic oligonucleotide
  source 1..36: mol_type = other RNA
ttgtattatgtgaatcagtagcagccgaaaggctgc

SEQ ID NO: 1046 - RNA, 22 nt, synthetic construct
  misc_feature 1..22: note = Description of Artificial Sequence: Synthetic oligonucleotide
  source 1..22: mol_type = other RNA
tactgattcacataatacaagg

SEQ ID NO: 1047 - RNA, 36 nt, synthetic construct
  misc_feature 1..36: note = Description of Artificial Sequence: Synthetic oligonucleotide
  source 1..36: mol_type = other RNA
gtattatgtgaatcagtgaagcagccgaaaggctgc

SEQ ID NO: 1048 - RNA, 22 nt, synthetic construct
  misc_feature 1..22: note = Description of Artificial Sequence: Synthetic oligonucleotide
  source 1..22: mol_type = other RNA
ttcactgattcacataatacgg

SEQ ID NO: 1049 - RNA, 36 nt, synthetic construct
  misc_feature 1..36: note = Description of Artificial Sequence: Synthetic oligonucleotide
  source 1..36: mol_type = other RNA
tattatgtgaatcagtgagagcagccgaaaggctgc

SEQ ID NO: 1050 - RNA, 22 nt, synthetic construct
  misc_feature 1..22: note = Description of Artificial Sequence: Synthetic oligonucleotide
  source 1..22: mol_type = other RNA
tctcactgattcacataatagg

SEQ ID NO: 1051 - RNA, 36 nt, synthetic construct
  misc_feature 1..36: note = Description of Artificial Sequence: Synthetic oligonucleotide
  source 1..36: mol_type = other RNA
attatgtgaatcagtgagaagcagccgaaaggctgc

SEQ ID NO: 1052 - RNA, 22 nt, synthetic construct
  misc_feature 1..22: note = Description of Artificial Sequence: Synthetic oligonucleotide
  source 1..22: mol_type = other RNA
ttctcactgattcacataatgg

SEQ ID NO: 1053 - RNA, 36 nt, synthetic construct
  misc_feature 1..36: note = Description of Artificial Sequence: Synthetic oligonucleotide
  source 1..36: mol_type = other RNA
ttatgtgaatcagtgagatagcagccgaaaggctgc

SEQ ID NO: 1054 - RNA, 22 nt, synthetic construct
  misc_feature 1..22: note = Description of Artificial Sequence: Synthetic oligonucleotide
  source 1..22: mol_type = other RNA
tatctcactgattcacataagg

SEQ ID NO: 1055 - RNA, 36 nt, synthetic construct
  misc_feature 1..36: note = Description of Artificial Sequence: Synthetic oligonucleotide
  source 1..36: mol_type = other RNA
tatgtgaatcagtgagatgagcagccgaaaggctgc

SEQ ID NO: 1056 - RNA, 22 nt, synthetic construct
  misc_feature 1..22: note = Description of Artificial Sequence: Synthetic oligonucleotide
  source 1..22: mol_type = other RNA
tcatctcactgattcacatagg

SEQ ID NO: 1057 - RNA, 36 nt, synthetic construct
  misc_feature 1..36: note = Description of Artificial Sequence: Synthetic oligonucleotide
  source 1..36: mol_type = other RNA
atgtgaatcagtgagatgtagcagccgaaaggctgc

SEQ ID NO: 1058 - RNA, 22 nt, synthetic construct
  misc_feature 1..22: note = Description of Artificial Sequence: Synthetic oligonucleotide
  source 1..22: mol_type = other RNA
tacatctcactgattcacatgg

SEQ ID NO: 1059 - RNA, 36 nt, synthetic construct
  misc_feature 1..36: note = Description of Artificial Sequence: Synthetic oligonucleotide
  source 1..36: mol_type = other RNA
tgtgaatcagtgagatgttagcagccgaaaggctgc

SEQ ID NO: 1060 - RNA, 22 nt, synthetic construct
  misc_feature 1..22: note = Description of Artificial Sequence: Synthetic oligonucleotide
  source 1..22: mol_type = other RNA
taacatctcactgattcacagg

SEQ ID NO: 1061 - RNA, 36 nt, synthetic construct
  misc_feature 1..36: note = Description of Artificial Sequence: Synthetic oligonucleotide
  source 1..36: mol_type = other RNA
gtgaatcagtgagatgttaagcagccgaaaggctgc

SEQ ID NO: 1062 - RNA, 22 nt, synthetic construct
  misc_feature 1..22: note = Description of Artificial Sequence: Synthetic oligonucleotide
  source 1..22: mol_type = other RNA
ttaacatctcactgattcacgg

SEQ ID NO: 1063 - RNA, 36 nt, synthetic construct
  misc_feature 1..36: note = Description of Artificial Sequence: Synthetic oligonucleotide
  source 1..36: mol_type = other RNA
gtgagatgttagtagaataagcagccgaaaggctgc

SEQ ID NO: 1064 - RNA, 22 nt, synthetic construct
  misc_feature 1..22: note = Description of Artificial Sequence: Synthetic oligonucleotide
  source 1..22: mol_type = other RNA
ttattctactaacatctcacgg

SEQ ID NO: 1065 - RNA, 36 nt, synthetic construct
  misc_feature 1..36: note = Description of Artificial Sequence: Synthetic oligonucleotide
  source 1..36: mol_type = other RNA
tttctatttatgcatttgaagcagccgaaaggctgc

SEQ ID NO: 1066 - RNA, 22 nt, synthetic construct
  misc_feature 1..22: note = Description of Artificial Sequence: Synthetic oligonucleotide
  source 1..22: mol_type = other RNA
ttcaaatgcataaatagaaagg

SEQ ID NO: 1067 - RNA, 36 nt, synthetic construct
  misc_feature 1..36: note = Description of Artificial Sequence: Synthetic oligonucleotide
  source 1..36: mol_type = other RNA
ctatttatgcatttgagtaagcagccgaaaggctgc

SEQ ID NO: 1068 - RNA, 22 nt, synthetic construct
  misc_feature 1..22: note = Description of Artificial Sequence: Synthetic oligonucleotide
  source 1..22: mol_type = other RNA
ttactcaaatgcataaataggg

SEQ ID NO: 1069 - RNA, 36 nt, synthetic construct
  misc_feature 1..36: note = Description of Artificial Sequence: Synthetic oligonucleotide
  source 1..36: mol_type = other RNA
tgctcaaactgttaaatgtagcagccgaaaggctgc

SEQ ID NO: 1070 - RNA, 22 nt, synthetic construct
  misc_feature 1..22: note = Description of Artificial Sequence: Synthetic oligonucleotide
  source 1..22: mol_type = other RNA
tacatttaacagtttgagcagg

SEQ ID NO: 1071 - RNA, 36 nt, synthetic construct
  misc_feature 1..36: note = Description of Artificial Sequence: Synthetic oligonucleotide
  source 1..36: mol_type = other RNA
gctcaaactgttaaatgttagcagccgaaaggctgc

SEQ ID NO: 1072 - RNA, 22 nt, synthetic construct
  misc_feature 1..22: note = Description of Artificial Sequence: Synthetic oligonucleotide
  source 1..22: mol_type = other RNA
taacatttaacagtttgagcgg

SEQ ID NO: 1073 - RNA, 36 nt, synthetic construct
  misc_feature 1..36: note = Description of Artificial Sequence: Synthetic oligonucleotide
  source 1..36: mol_type = other RNA
ctcaaactgttaaatgttgagcagccgaaaggctgc

SEQ ID NO: 1074 - RNA, 22 nt, synthetic construct
  misc_feature 1..22: note = Description of Artificial Sequence: Synthetic oligonucleotide
  source 1..22: mol_type = other RNA
tcaacatttaacagtttgaggg

SEQ ID NO: 1075 - RNA, 36 nt, synthetic construct
  misc_feature 1..36: note = Description of Artificial Sequence: Synthetic oligonucleotide
  source 1..36: mol_type = other RNA
tcaaactgttaaatgttggagcagccgaaaggctgc

SEQ ID NO: 1076 - RNA, 22 nt, synthetic construct
  misc_feature 1..22: note = Description of Artificial Sequence: Synthetic oligonucleotide
  source 1..22: mol_type = other RNA
tccaacatttaacagtttgagg

SEQ ID NO: 1077 - RNA, 36 nt, synthetic construct
  misc_feature 1..36: note = Description of Artificial Sequence: Synthetic oligonucleotide
  source 1..36: mol_type = other RNA
caaactgttaaatgttggaagcagccgaaaggctgc

SEQ ID NO: 1078 - RNA, 22 nt, synthetic construct
  misc_feature 1..22: note = Description of Artificial Sequence: Synthetic oligonucleotide
  source 1..22: mol_type = other RNA
ttccaacatttaacagtttggg

SEQ ID NO: 1079 - RNA, 36 nt, synthetic construct
  misc_feature 1..36: note = Description of Artificial Sequence: Synthetic oligonucleotide
  source 1..36: mol_type = other RNA
aaactgttaaatgttggaaagcagccgaaaggctgc

SEQ ID NO: 1080 - RNA, 22 nt, synthetic construct
  misc_feature 1..22: note = Description of Artificial Sequence: Synthetic oligonucleotide
  source 1..22: mol_type = other RNA
tttccaacatttaacagtttgg

SEQ ID NO: 1081 - RNA, 36 nt, synthetic construct
  misc_feature 1..36: note = Description of Artificial Sequence: Synthetic oligonucleotide
  source 1..36: mol_type = other RNA
aactgttaaatgttggaaaagcagccgaaaggctgc

SEQ ID NO: 1082 - RNA, 22 nt, synthetic construct
  misc_feature 1..22: note = Description of Artificial Sequence: Synthetic oligonucleotide
  source 1..22: mol_type = other RNA
ttttccaacatttaacagttgg

SEQ ID NO: 1083 - RNA, 36 nt, synthetic construct
  misc_feature 1..36: note = Description of Artificial Sequence: Synthetic oligonucleotide
  source 1..36: mol_type = other RNA
tgttaaatgttggaaaagaagcagccgaaaggctgc

SEQ ID NO: 1084 - RNA, 22 nt, synthetic construct
  misc_feature 1..22: note = Description of Artificial Sequence: Synthetic oligonucleotide
  source 1..22: mol_type = other RNA
ttcttttccaacatttaacagg

SEQ ID NO: 1085 - RNA, 36 nt, synthetic construct
  misc_feature 1..36: note = Description of Artificial Sequence: Synthetic oligonucleotide
  source 1..36: mol_type = other RNA
gttaaatgttggaaaagaaagcagccgaaaggctgc

SEQ ID NO: 1086 - RNA, 22 nt, synthetic construct
  misc_feature 1..22: note = Description of Artificial Sequence: Synthetic oligonucleotide
  source 1..22: mol_type = other RNA
tttcttttccaacatttaacgg

SEQ ID NO: 1087 - RNA, 36 nt, synthetic construct
  misc_feature 1..36: note = Description of Artificial Sequence: Synthetic oligonucleotide
  source 1..36: mol_type = other RNA
ttaaatgttggaaaagaaaagcagccgaaaggctgc

SEQ ID NO: 1088 - RNA, 22 nt, synthetic construct
  misc_feature 1..22: note = Description of Artificial Sequence: Synthetic oligonucleotide
  source 1..22: mol_type = other RNA
ttttcttttccaacatttaagg

SEQ ID NO: 1089 - RNA, 36 nt, synthetic construct
  misc_feature 1..36: note = Description of Artificial Sequence: Synthetic oligonucleotide
  source 1..36: mol_type = other RNA
taaatgttggaaaagaaagagcagccgaaaggctgc

SEQ ID NO: 1090 - RNA, 22 nt, synthetic construct
  misc_feature 1..22: note = Description of Artificial Sequence: Synthetic oligonucleotide
  source 1..22: mol_type = other RNA
tctttcttttccaacatttagg

SEQ ID NO: 1091 - RNA, 36 nt, synthetic construct
  misc_feature 1..36: note = Description of Artificial Sequence: Synthetic oligonucleotide
  source 1..36: mol_type = other RNA
agaaaagaggctacttgtgagcagccgaaaggctgc

SEQ ID NO: 1092 - RNA, 22 nt, synthetic construct
  misc_feature 1..22: note = Description of Artificial Sequence: Synthetic oligonucleotide
  source 1..22: mol_type = other RNA
tcacaagtagcctcttttctgg

SEQ ID NO: 1093 - RNA, 36 nt, synthetic construct
  misc_feature 1..36: note = Description of Artificial Sequence: Synthetic oligonucleotide
  source 1..36: mol_type = other RNA
gaaaagaggctacttgtgaagcagccgaaaggctgc

SEQ ID NO: 1094 - RNA, 22 nt, synthetic construct
  misc_feature 1..22: note = Description of Artificial Sequence: Synthetic oligonucleotide
  source 1..22: mol_type = other RNA
ttcacaagtagcctcttttcgg

SEQ ID NO: 1095 - RNA, 36 nt, synthetic construct
  misc_feature 1..36: note = Description of Artificial Sequence: Synthetic oligonucleotide
  source 1..36: mol_type = other RNA
aaaagaggctacttgtgaaagcagccgaaaggctgc

SEQ ID NO: 1096 - RNA, 22 nt, synthetic construct
  misc_feature 1..22: note = Description of Artificial Sequence: Synthetic oligonucleotide
  source 1..22: mol_type = other RNA
tttcacaagtagcctcttttgg

SEQ ID NO: 1097 - RNA, 36 nt, synthetic construct
  misc_feature 1..36: note = Description of Artificial Sequence: Synthetic oligonucleotide
  source 1..36: mol_type = other RNA
agaggctacttgtgaaaatagcagccgaaaggctgc

SEQ ID NO: 1098 - RNA, 22 nt, synthetic construct
  misc_feature 1..22: note = Description of Artificial Sequence: Synthetic oligonucleotide
  source 1..22: mol_type = other RNA
tattttcacaagtagcctctgg

SEQ ID NO: 1099 - RNA, 36 nt, synthetic construct
  misc_feature 1..36: note = Description of Artificial Sequence: Synthetic oligonucleotide
  source 1..36: mol_type = other RNA
gaggctacttgtgaaaataagcagccgaaaggctgc

SEQ ID NO: 1100 - RNA, 22 nt, synthetic construct
  misc_feature 1..22: note = Description of Artificial Sequence: Synthetic oligonucleotide
  source 1..22: mol_type = other RNA
ttattttcacaagtagcctcgg

SEQ ID NO: 1101 - RNA, 36 nt, synthetic construct
  misc_feature 1..36: note = Description of Artificial Sequence: Synthetic oligonucleotide
  source 1..36: mol_type = other RNA
aaagttacaagtttcttttagcagccgaaaggctgc

SEQ ID NO: 1102 - RNA, 22 nt, synthetic construct
  misc_feature 1..22: note = Description of Artificial Sequence: Synthetic oligonucleotide
  source 1..22: mol_type = other RNA
taaaagaaacttgtaactttgg

SEQ ID NO: 1103 - RNA, 36 nt, synthetic construct
  misc_feature 1..36: note = Description of Artificial Sequence: Synthetic oligonucleotide
  source 1..36: mol_type = other RNA
caacagtattttctaataaagcagccgaaaggctgc

SEQ ID NO: 1104 - RNA, 22 nt, synthetic construct
  misc_feature 1..22: note = Description of Artificial Sequence: Synthetic oligonucleotide
  source 1..22: mol_type = other RNA
tttattagaaaatactgttggg

SEQ ID NO: 1105 - RNA, 36 nt, synthetic construct
  misc_feature 1..36: note = Description of Artificial Sequence: Synthetic oligonucleotide
  source 1..36: mol_type = other RNA
aacagtattttctaataacagcagccgaaaggctgc

SEQ ID NO: 1106 - RNA, 22 nt, synthetic construct
  misc_feature 1..22: note = Description of Artificial Sequence: Synthetic oligonucleotide
  source 1..22: mol_type = other RNA
tgttattagaaaatactgttgg

SEQ ID NO: 1107 - RNA, 36 nt, synthetic construct
  misc_feature 1..36: note = Description of Artificial Sequence: Synthetic oligonucleotide
  source 1..36: mol_type = other RNA
acagtattttctaataaccagcagccgaaaggctgc

SEQ ID NO: 1108 - RNA, 22 nt, synthetic construct
  misc_feature 1..22: note = Description of Artificial Sequence: Synthetic oligonucleotide
  source 1..22: mol_type = other RNA
tggttattagaaaatactgtgg

SEQ ID NO: 1109 - RNA, 36 nt, synthetic construct
  misc_feature 1..36: note = Description of Artificial Sequence: Synthetic oligonucleotide
  source 1..36: mol_type = other RNA
cagtattttctaataaccaagcagccgaaaggctgc

SEQ ID NO: 1110 - RNA, 22 nt, synthetic construct
  misc_feature 1..22: note = Description of Artificial Sequence: Synthetic oligonucleotide
  source 1..22: mol_type = other RNA
ttggttattagaaaatactggg

SEQ ID NO: 1111 - RNA, 36 nt, synthetic construct
  misc_feature 1..36: note = Description of Artificial Sequence: Synthetic oligonucleotide
  source 1..36: mol_type = other RNA
ttgtgattgttatcaggaaagcagccgaaaggctgc

SEQ ID NO: 1112 - RNA, 22 nt, synthetic construct
  misc_feature 1..22: note = Description of Artificial Sequence: Synthetic oligonucleotide
  source 1..22: mol_type = other RNA
tttcctgataacaatcacaagg

SEQ ID NO: 1113 - RNA, 36 nt, synthetic construct
  misc_feature 1..36: note = Description of Artificial Sequence: Synthetic oligonucleotide
  source 1..36: mol_type = other RNA
tgtgattgttatcaggaaaagcagccgaaaggctgc

SEQ ID NO: 1114 - RNA, 22 nt, synthetic construct
  misc_feature 1..22: note = Description of Artificial Sequence: Synthetic oligonucleotide
  source 1..22: mol_type = other RNA
ttttcctgataacaatcacagg

SEQ ID NO: 1115 - RNA, 36 nt, synthetic construct
  misc_feature 1..36: note = Description of Artificial Sequence: Synthetic oligonucleotide
  source 1..36: mol_type = other RNA
gtgattgttatcaggaaaaagcagccgaaaggctgc

SEQ ID NO: 1116 - RNA, 22 nt, synthetic construct
  misc_feature 1..22: note = Description of Artificial Sequence: Synthetic oligonucleotide
  source 1..22: mol_type = other RNA
tttttcctgataacaatcacgg

SEQ ID NO: 1117 - RNA, 36 nt, synthetic construct
  misc_feature 1..36: note = Description of Artificial Sequence: Synthetic oligonucleotide
  source 1..36: mol_type = other RNA
tgattgttatcaggaaaaaagcagccgaaaggctgc

SEQ ID NO: 1118 - RNA, 22 nt, synthetic construct
  misc_feature 1..22: note = Description of Artificial Sequence: Synthetic oligonucleotide
  source 1..22: mol_type = other RNA
ttttttcctgataacaatcagg

SEQ ID NO: 1119 - RNA, 36 nt, synthetic construct
  misc_feature 1..36: note = Description of Artificial Sequence: Synthetic oligonucleotide
  source 1..36: mol_type = other RNA
gattgttatcaggaaaaaaagcagccgaaaggctgc

SEQ ID NO: 1120 - RNA, 22 nt, synthetic construct
  misc_feature 1..22: note = Description of Artificial Sequence: Synthetic oligonucleotide
  source 1..22: mol_type = other RNA
tttttttcctgataacaatcgg

SEQ ID NO: 1121 - RNA, 36 nt, synthetic construct
  misc_feature 1..36: note = Description of Artificial Sequence: Synthetic oligonucleotide
  source 1..36: mol_type = other RNA
attgttatcaggaaaaaatagcagccgaaaggctgc

SEQ ID NO: 1122 - RNA, 22 nt, synthetic construct
  misc_feature 1..22: note = Description of Artificial Sequence: Synthetic oligonucleotide
  source 1..22: mol_type = other RNA
tattttttcctgataacaatgg

SEQ ID NO: 1123 - RNA, 36 nt, synthetic construct
  misc_feature 1..36: note = Description of Artificial Sequence: Synthetic oligonucleotide
  source 1..36: mol_type = other RNA
ttgttatcaggaaaaaataagcagccgaaaggctgc

SEQ ID NO: 1124 - RNA, 22 nt, synthetic construct
  misc_feature 1..22: note = Description of Artificial Sequence: Synthetic oligonucleotide
  source 1..22: mol_type = other RNA
ttattttttcctgataacaagg

SEQ ID NO: 1125 - RNA, 36 nt, synthetic construct
  misc_feature 1..36: note = Description of Artificial Sequence: Synthetic oligonucleotide
  source 1..36: mol_type = other RNA
tgttatcaggaaaaaatatagcagccgaaaggctgc

SEQ ID NO: 1126 - RNA, 22 nt, synthetic construct
  misc_feature 1..22: note = Description of Artificial Sequence: Synthetic oligonucleotide
  source 1..22: mol_type = other RNA
tatattttttcctgataacagg

SEQ ID NO: 1127 - RNA, 36 nt, synthetic construct
  misc_feature 1..36: note = Description of Artificial Sequence: Synthetic oligonucleotide
  source 1..36: mol_type = other RNA
gttatcaggaaaaaatataagcagccgaaaggctgc

SEQ ID NO: 1128 - RNA, 22 nt, synthetic construct
  misc_feature 1..22: note = Description of Artificial Sequence: Synthetic oligonucleotide
  source 1..22: mol_type = other RNA
ttatattttttcctgataacgg

SEQ ID NO: 1129 - RNA, 36 nt, synthetic construct
  misc_feature 1..36: note = Description of Artificial Sequence: Synthetic oligonucleotide
  source 1..36: mol_type = other RNA
ttatcaggaaaaaatatatagcagccgaaaggctgc

SEQ ID NO: 1130 - RNA, 22 nt, synthetic construct
  misc_feature 1..22: note = Description of Artificial Sequence: Synthetic oligonucleotide
  source 1..22: mol_type = other RNA
tatatattttttcctgataagg

SEQ ID NO: 1131 - RNA, 36 nt, synthetic construct
  misc_feature 1..36: note = Description of Artificial Sequence: Synthetic oligonucleotide
  source 1..36: mol_type = other RNA
aggaaaaaatatattaaatagcagccgaaaggctgc

SEQ ID NO: 1132 - RNA, 22 nt, synthetic construct
  misc_feature 1..22: note = Description of Artificial Sequence: Synthetic oligonucleotide
  source 1..22: mol_type = other RNA
tatttaatatattttttcctgg

SEQ ID NO: 1133 - RNA, 36 nt, synthetic construct
  misc_feature 1..36: note = Description of Artificial Sequence: Synthetic oligonucleotide
  source 1..36: mol_type = other RNA
ggaaaaaatatattaaatgagcagccgaaaggctgc

SEQ ID NO: 1134 - RNA, 22 nt, synthetic construct
  misc_feature 1..22: note = Description of Artificial Sequence: Synthetic oligonucleotide
  source 1..22: mol_type = other RNA
tcatttaatatattttttccgg

SEQ ID NO: 1135 - RNA, 36 nt, synthetic construct
  misc_feature 1..36: note = Description of Artificial Sequence: Synthetic oligonucleotide
  source 1..36: mol_type = other RNA
gaaaaaatatattaaatggagcagccgaaaggctgc

SEQ ID NO: 1136 - RNA, 22 nt, synthetic construct
  misc_feature 1..22: note = Description of Artificial Sequence: Synthetic oligonucleotide
  source 1..22: mol_type = other RNA
tccatttaatatattttttcgg

SEQ ID NO: 1137 - RNA, 36 nt, synthetic construct
  misc_feature 1..36: note = Description of Artificial Sequence: Synthetic oligonucleotide
  source 1..36: mol_type = other RNA
attttctttctgcttttaaagcagccgaaaggctgc

SEQ ID NO: 1138 - RNA, 22 nt, synthetic construct
  misc_feature 1..22: note = Description of Artificial Sequence: Synthetic oligonucleotide
  source 1..22: mol_type = other RNA
tttaaaagcagaaagaaaatgg

SEQ ID NO: 1139 - RNA, 36 nt, synthetic construct
  misc_feature 1..36: note = Description of Artificial Sequence: Synthetic oligonucleotide
  source 1..36: mol_type = other RNA
tctttctgcttttaaaaatagcagccgaaaggctgc

SEQ ID NO: 1140 - RNA, 22 nt, synthetic construct
  misc_feature 1..22: note = Description of Artificial Sequence: Synthetic oligonucleotide
  source 1..22: mol_type = other RNA
tatttttaaaagcagaaagagg

SEQ ID NO: 1141 - RNA, 36 nt, synthetic construct
  misc_feature 1..36: note = Description of Artificial Sequence: Synthetic oligonucleotide
  source 1..36: mol_type = other RNA
taaggaaatcaggaagtgtagcagccgaaaggctgc

SEQ ID NO: 1142 - RNA, 22 nt, synthetic construct
  misc_feature 1..22: note = Description of Artificial Sequence: Synthetic oligonucleotide
  source 1..22: mol_type = other RNA
tacacttcctgatttccttagg

SEQ ID NO: 1143 - RNA, 36 nt, synthetic construct
  misc_feature 1..36: note = Description of Artificial Sequence: Synthetic oligonucleotide
  source 1..36: mol_type = other RNA
aaggaaatcaggaagtgtaagcagccgaaaggctgc

SEQ ID NO: 1144 - RNA, 22 nt, synthetic construct
  misc_feature 1..22: note = Description of Artificial Sequence: Synthetic oligonucleotide
  source 1..22: mol_type = other RNA
ttacacttcctgatttccttgg

SEQ ID NO: 1145 - RNA, 36 nt, synthetic construct
  misc_feature 1..36: note = Description of Artificial Sequence: Synthetic oligonucleotide
  source 1..36: mol_type = other RNA
ggaaatcaggaagtgtaatagcagccgaaaggctgc

SEQ ID NO: 1146 - RNA, 22 nt, synthetic construct
  misc_feature 1..22: note = Description of Artificial Sequence: Synthetic oligonucleotide
  source 1..22: mol_type = other RNA
tattacacttcctgatttccgg

SEQ ID NO: 1147 - RNA, 36 nt, synthetic construct
  misc_feature 1..36: note = Description of Artificial Sequence: Synthetic oligonucleotide
  source 1..36: mol_type = other RNA
ccacacccagctagtttttagcagccgaaaggctgc

SEQ ID NO: 1148 - RNA, 22 nt, synthetic construct
  misc_feature 1..22: note = Description of Artificial Sequence: Synthetic oligonucleotide
  source 1..22: mol_type = other RNA
taaaaactagctgggtgtgggg

SEQ ID NO: 1149 - RNA, 36 nt, synthetic construct
  misc_feature 1..36: note = Description of Artificial Sequence: Synthetic oligonucleotide
  source 1..36: mol_type = other RNA
cacacccagctagttttttagcagccgaaaggctgc

SEQ ID NO: 1150 - RNA, 22 nt, synthetic construct
  misc_feature 1..22: note = Description of Artificial Sequence: Synthetic oligonucleotide
  source 1..22: mol_type = other RNA
taaaaaactagctgggtgtggg

SEQ ID NO: 1151 - RNA, 36 nt, synthetic construct
  misc_feature 1..36: note = Description of Artificial Sequence: Synthetic oligonucleotide
  source 1..36: mol_type = other RNA
ctaggattacaggtgtgagagcagccgaaaggctgc

SEQ ID NO: 1152 - RNA, 22 nt, synthetic construct
  misc_feature 1..22: note = Description of Artificial Sequence: Synthetic oligonucleotide
  source 1..22: mol_type = other RNA
tctcacacctgtaatcctaggg

SEQ ID NO: 1153 - RNA, 36 nt, synthetic construct
  misc_feature 1..36: note = Description of Artificial Sequence: Synthetic oligonucleotide
  source 1..36: mol_type = other RNA
agagtatgagcctgattttagcagccgaaaggctgc

SEQ ID NO: 1154 - RNA, 22 nt, synthetic construct
  misc_feature 1..22: note = Description of Artificial Sequence: Synthetic oligonucleotide
  source 1..22: mol_type = other RNA
taaaatcaggctcatactctgg

SEQ ID NO: 1155 - RNA, 36 nt, synthetic construct
  misc_feature 1..36: note = Description of Artificial Sequence: Synthetic oligonucleotide
  source 1..36: mol_type = other RNA
gagtatgagcctgattttgagcagccgaaaggctgc

SEQ ID NO: 1156 - RNA, 22 nt, synthetic construct
  misc_feature 1..22: note = Description of Artificial Sequence: Synthetic oligonucleotide
  source 1..22: mol_type = other RNA
tcaaaatcaggctcatactcgg

SEQ ID NO: 1157 - RNA, 36 nt, synthetic construct
  misc_feature 1..36: note = Description of Artificial Sequence: Synthetic oligonucleotide
  source 1..36: mol_type = other RNA
cccatctctactaaaaaatagcagccgaaaggctgc

SEQ ID NO: 1158 - RNA, 22 nt, synthetic construct
  misc_feature 1..22: note = Description of Artificial Sequence: Synthetic oligonucleotide
  source 1..22: mol_type = other RNA
tattttttagtagagatggggg

SEQ ID NO: 1159 - RNA, 36 nt, synthetic construct
  misc_feature 1..36: note = Description of Artificial Sequence: Synthetic oligonucleotide
  source 1..36: mol_type = other RNA
actttcagcatgagaaaatagcagccgaaaggctgc

SEQ ID NO: 1160 - RNA, 22 nt, synthetic construct
  misc_feature 1..22: note = Description of Artificial Sequence: Synthetic oligonucleotide
  source 1..22: mol_type = other RNA
tattttctcatgctgaaagtgg

SEQ ID NO: 1161 - RNA, 35 nt, synthetic construct
  misc_feature 1..35: note = Description of Artificial Sequence: Synthetic oligonucleotide
  source 1..35: mol_type = other RNA
ctgagctgagttggttttagcagccgaaaggctgc

SEQ ID NO: 1162 - RNA, 22 nt, synthetic construct
  misc_feature 1..22: note = Description of Artificial Sequence: Synthetic oligonucleotide
  source 1..22: mol_type = other RNA
ttaaaaccaactcagctcaggg

SEQ ID NO: 1163 - RNA, 36 nt, synthetic construct
  misc_feature 1..36: note = Description of Artificial Sequence: Synthetic oligonucleotide
  source 1..36: mol_type = other RNA
gctgagttggttttatgaaagcagccgaaaggctgc

SEQ ID NO: 1164 - RNA, 22 nt, synthetic construct
  misc_feature 1..22: note = Description of Artificial Sequence: Synthetic oligonucleotide
  source 1..22: mol_type = other RNA
tttcataaaaccaactcagcgg

SEQ ID NO: 1165 - RNA, 20 nt, synthetic construct
  misc_feature 1..20: note = Description of Artificial Sequence: Synthetic oligonucleotide
  source 1..20: mol_type = other RNA
ctgttgaattttgtattata

SEQ ID NO: 1166 - RNA, 22 nt, synthetic construct
  misc_feature 1..22: note = Description of Artificial Sequence: Synthetic oligonucleotide
  source 1..22: mol_type = other RNA
tataatacaaaattcaacaggg

SEQ ID NO: 1167 - DNA, 19 bp, unidentified
  misc_feature 1..19: note = Description of Unknown: Target Sequence
  source 1..19: mol_type = unassigned DNA
caacgtacccttcattgat

SEQ ID NO: 1168 - DNA, 19 bp, unidentified
  misc_feature 1..19: note = Description of Unknown: Target Sequence
  source 1..19: mol_type = unassigned DNA
tgaaagacaaaggtggata

SEQ ID NO: 1169 - DNA, 19 bp, unidentified
  misc_feature 1..19: note = Description of Unknown: Target Sequence
  source 1..19: mol_type = unassigned DNA
tacatgagcaagatttgca

SEQ ID NO: 1170 - DNA, 19 bp, unidentified
  misc_feature 1..19: note = Description of Unknown: Target Sequence
  source 1..19: mol_type = unassigned DNA
tgagcaagatttgcaactt

SEQ ID NO: 1171 - DNA, 19 bp, unidentified
  misc_feature 1..19: note = Description of Unknown: Target Sequence
  source 1..19: mol_type = unassigned DNA
ctctgagctgagttggttt

SEQ ID NO: 1172 - DNA, 19 bp, unidentified
  misc_feature 1..19: note = Description of Unknown: Target Sequence
  source 1..19: mol_type = unassigned DNA
ctttttcacctaactaaaa

SEQ ID NO: 1173 - DNA, 19 bp, unidentified
  misc_feature 1..19: note = Description of Unknown: Target Sequence
  source 1..19: mol_type = unassigned DNA
ttcacctaactaaaataat

SEQ ID NO: 1174 - DNA, 19 bp, unidentified
  misc_feature 1..19: note = Description of Unknown: Target Sequence
  source 1..19: mol_type = unassigned DNA
ctaactaaaataatgttta

SEQ ID NO: 1175 - DNA, 19 bp, unidentified
  misc_feature 1..19: note = Description of Unknown: Target Sequence
  source 1..19: mol_type = unassigned DNA
ctgagctgagttggtttta

SEQ ID NO: 1176 - DNA, 19 bp, unidentified
  misc_feature 1..19: note = Description of Unknown: Target Sequence
  source 1..19: mol_type = unassigned DNA
gctgagttggttttatgaa

SEQ ID NO: 1177 - RNA, 16 nt, synthetic construct
  misc_feature 1..16: note = Description of Artificial Sequence: Synthetic oligonucleotide
  source 1..16: mol_type = other RNA
gcagccgaaaggctgc

SEQ ID NO: 1178 - RNA, 36 nt, synthetic construct
  misc_feature 1..36: note = Description of Artificial Sequence: Synthetic oligonucleotide
  source 1..36: mol_type = other RNA
cccattaggataatgtcttagcagccgaaaggctgc

SEQ ID NO: 1179 - RNA, 22 nt, synthetic construct
  misc_feature 1..22: note = Description of Artificial Sequence: Synthetic oligonucleotide
  source 1..22: mol_type = other RNA
taagacattatcctaatggggg

SEQ ID NO: 1180 - RNA, 36 nt, synthetic construct
  misc_feature 1..36: note = Description of Artificial Sequence: Synthetic oligonucleotide
  source 1..36: mol_type = other RNA
acaacgtacccttcattgaagcagccgaaaggctgc

SEQ ID NO: 1181 - RNA, 22 nt, synthetic construct
  misc_feature 1..22: note = Description of Artificial Sequence: Synthetic oligonucleotide
  source 1..22: mol_type = other RNA
ttcaatgaagggtacgttgtgg

SEQ ID NO: 1182 - RNA, 36 nt, synthetic construct
  misc_feature 1..36: note = Description of Artificial Sequence: Synthetic oligonucleotide
  source 1..36: mol_type = other RNA
gcactgagtgaagaaatgaagcagccgaaaggctgc

SEQ ID NO: 1183 - RNA, 22 nt, synthetic construct
  misc_feature 1..22: note = Description of Artificial Sequence: Synthetic oligonucleotide
  source 1..22: mol_type = other RNA
ttcatttcttcactcagtgcgg

SEQ ID NO: 1184 - RNA, 36 nt, synthetic construct
  misc_feature 1..36: note = Description of Artificial Sequence: Synthetic oligonucleotide
  source 1..36: mol_type = other RNA
acttgctacccattaggatagcagccgaaaggctgc

SEQ ID NO: 1185 - RNA, 22 nt, synthetic construct
  misc_feature 1..22: note = Description of Artificial Sequence: Synthetic oligonucleotide
  source 1..22: mol_type = other RNA
tatcctaatgggtagcaagtgg

SEQ ID NO: 1186 - RNA, 36 nt, synthetic construct; identical to SEQ ID NO: 1178
  misc_feature 1..36: note = Description of Artificial Sequence: Synthetic oligonucleotide
  source 1..36: mol_type = other RNA

SEQ ID NO: 1187 - RNA, 22 nt, synthetic construct
  misc_feature 1..22: note = Description of Artificial Sequence: Synthetic oligonucleotide
  source 1..22: mol_type = other RNA
taagacattatcctaatggggg

SEQ ID NO: 1188 - RNA, 36 nt, synthetic construct
  misc_feature 1..36: note = Description of Artificial Sequence: Synthetic oligonucleotide
  source 1..36: mol_type = other RNA
ctgagctgagttggttttaagcagccgaaaggctgc

SEQ ID NO: 1189 - RNA, 22 nt, synthetic construct
  misc_feature 1..22: note = Description of Artificial Sequence: Synthetic oligonucleotide
  source 1..22: mol_type = other RNA
ttaaaaccaactcagctcaggg

SEQ ID NO: 1190 - RNA, 36 nt, synthetic construct; identical to SEQ ID NO: 1163
  misc_feature 1..36: note = Description of Artificial Sequence: Synthetic oligonucleotide
  source 1..36: mol_type = other RNA

SEQ ID NO: 1191 - RNA, 22 nt, synthetic construct
  misc_feature 1..22: note = Description of Artificial Sequence: Synthetic oligonucleotide
  source 1..22: mol_type = other RNA
tttcataaaaccaactcagcgg

SEQ ID NO: 1192 - RNA, 36 nt, synthetic construct
  misc_feature 1..36: note = Description of Artificial Sequence: Synthetic oligonucleotide
  source 1..36: mol_type = other RNA
gttggttttatgaaaagctagcagccgaaaggctgc

SEQ ID NO: 1193 - RNA, 22 nt, synthetic construct
  misc_feature 1..22: note = Description of Artificial Sequence: Synthetic oligonucleotide
  source 1..22: mol_type = other RNA
tagcttttcataaaaccaacgg

SEQ ID NO: 1194 - RNA, 36 nt, synthetic construct
  misc_feature 1..36: note = Description of Artificial Sequence: Synthetic oligonucleotide
  source 1..36: mol_type = other RNA
ggtaacaagatgataatctagcagccgaaaggctgc

SEQ ID NO: 1195 - RNA, 22 nt, synthetic construct
  misc_feature 1..22: note = Description of Artificial Sequence: Synthetic oligonucleotide
  source 1..22: mol_type = other RNA
tagattatcatcttgttaccgg

SEQ ID NO: 1196 - RNA, 36 nt, synthetic construct
  misc_feature 1..36: note = Description of Artificial Sequence: Synthetic oligonucleotide
  source 1..36: mol_type = other RNA
tttcacctaactaaaataaagcagccgaaaggctgc

SEQ ID NO: 1197 - RNA, 22 nt, synthetic construct
  misc_feature 1..22: note = Description of Artificial Sequence: Synthetic oligonucleotide
  source 1..22: mol_type = other RNA
tttattttagttaggtgaaagg

SEQ ID NO: 1198 - RNA, 36 nt, synthetic construct
  misc_feature 1..36: note = Description of Artificial Sequence: Synthetic oligonucleotide
  source 1..36: mol_type = other RNA
aaaataatgtttaaagagtagcagccgaaaggctgc

SEQ ID NO: 1199 - RNA, 22 nt, synthetic construct
  misc_feature 1..22: note = Description of Artificial Sequence: Synthetic oligonucleotide
  source 1..22: mol_type = other RNA
tactctttaaacattattttgg

SEQ ID NO: 1200 - RNA, 36 nt, synthetic construct
  misc_feature 1..36: note = Description of Artificial Sequence: Synthetic oligonucleotide
  source 1..36: mol_type = other RNA
aaataatgtttaaagagttagcagccgaaaggctgc

SEQ ID NO: 1201 - RNA, 22 nt, synthetic construct
  misc_feature 1..22: note = Description of Artificial Sequence: Synthetic oligonucleotide
  source 1..22: mol_type = other RNA
taactctttaaacattatttgg

SEQ ID NO: 1202 - RNA, 36 nt, synthetic construct
  misc_feature 1..36: note = Description of Artificial Sequence: Synthetic oligonucleotide
  source 1..36: mol_type = other RNA
aataatgtttaaagagtttagcagccgaaaggctgc

SEQ ID NO: 1203 - RNA, 22 nt, synthetic construct
  misc_feature 1..22: note = Description of Artificial Sequence: Synthetic oligonucleotide
  source 1..22: mol_type = other RNA
taaactctttaaacattattgg

SEQ ID NO: 1204 - RNA, 36 nt, synthetic construct
  misc_feature 1..36: note = Description of Artificial Sequence: Synthetic oligonucleotide
  source 1..36: mol_type = other RNA
gtttaaagagttttgtataagcagccgaaaggctgc

SEQ ID NO: 1205 - RNA, 22 nt, synthetic construct
  misc_feature 1..22: note = Description of Artificial Sequence: Synthetic oligonucleotide
  source 1..22: mol_type = other RNA
ttatacaaaactctttaaacgg

SEQ ID NO: 1206 - RNA, 36 nt, synthetic construct
  misc_feature 1..36: note = Description of Artificial Sequence: Synthetic oligonucleotide
  source 1..36: mol_type = other RNA
ttaaagagttttgtataaaagcagccgaaaggctgc

SEQ ID NO: 1207 - RNA, 22 nt, synthetic construct
  misc_feature 1..22: note = Description of Artificial Sequence: Synthetic oligonucleotide
  source 1..22: mol_type = other RNA
ttttatacaaaactctttaagg

SEQ ID NO: 1208 - RNA, 36 nt, synthetic construct
  misc_feature 1..36: note = Description of Artificial Sequence: Synthetic oligonucleotide
  source 1..36: mol_type = other RNA
gagttttgtataaaaatgtagcagccgaaaggctgc

SEQ ID NO: 1209 - RNA, 22 nt, synthetic construct
  misc_feature 1..22: note = Description of Artificial Sequence: Synthetic oligonucleotide
  source 1..22: mol_type = other RNA
tacatttttatacaaaactcgg

SEQ ID NO: 1210 - RNA, 36 nt, synthetic construct
  misc_feature 1..36: note = Description of Artificial Sequence: Synthetic oligonucleotide
  source 1..36: mol_type = other RNA
gcgttgttacctgttgaatagcagccgaaaggctgc

SEQ ID NO: 1211 - RNA, 22 nt, synthetic construct
  misc_feature 1..22: note = Description of Artificial Sequence: Synthetic oligonucleotide
  source 1..22: mol_type = other RNA
tattcaacaggtaacaacgcgg

SEQ ID NO: 1212 - RNA, 36 nt, synthetic construct
  misc_feature 1..36: note = Description of Artificial Sequence: Synthetic oligonucleotide
  source 1..36: mol_type = other RNA
gttacctgttgaattttgtagcagccgaaaggctgc

SEQ ID NO: 1213 - RNA, 22 nt, synthetic construct
  misc_feature 1..22: note = Description of Artificial Sequence: Synthetic oligonucleotide
  source 1..22: mol_type = other RNA
tacaaaattcaacaggtaacgg

SEQ ID NO: 1214 - RNA, 36 nt, synthetic construct
  misc_feature 1..36: note = Description of Artificial Sequence: Synthetic oligonucleotide
  source 1..36: mol_type = other RNA
cctgttgaattttgtattaagcagccgaaaggctgc

SEQ ID NO: 1215 - RNA, 22 nt, synthetic construct
  misc_feature 1..22: note = Description of Artificial Sequence: Synthetic oligonucleotide
  source 1..22: mol_type = other RNA
ttaatacaaaattcaacagggg

SEQ ID NO: 1216 - RNA, 36 nt, synthetic construct
  misc_feature 1..36: note = Description of Artificial Sequence: Synthetic oligonucleotide
  source 1..36: mol_type = other RNA
ctgttgaattttgtattatagcagccgaaaggctgc

SEQ ID NO: 1217 - RNA, 22 nt, synthetic construct
  misc_feature 1..22: note = Description of Artificial Sequence: Synthetic oligonucleotide
  source 1..22: mol_type = other RNA
tataatacaaaattcaacaggg

SEQ ID NO: 1218 - RNA, 36 nt, synthetic construct
  misc_feature 1..36: note = Description of Artificial Sequence: Synthetic oligonucleotide
  source 1..36: mol_type = other RNA
gaattttgtattatgtgaaagcagccgaaaggctgc

SEQ ID NO: 1219 - RNA, 22 nt, synthetic construct
  misc_feature 1..22: note = Description of Artificial Sequence: Synthetic oligonucleotide
  source 1..22: mol_type = other RNA
tttcacataatacaaaattcgg

SEQ ID NO: 1220 - RNA, 36 nt, synthetic construct; identical to SEQ ID NO: 787
  misc_feature 1..36: note = Description of Artificial Sequence: Synthetic oligonucleotide
  source 1..36: mol_type = other RNA

SEQ ID NO: 1221 - RNA, 22 nt, synthetic construct
  misc_feature 1..22: note = Description of Artificial Sequence: Synthetic oligonucleotide
  source 1..22: mol_type = other RNA
tatcaatgaagggtacgttggg

SEQ ID NO: 1222 - RNA, 36 nt, synthetic construct; identical to SEQ ID NO: 815
  misc_feature 1..36: note = Description of Artificial Sequence: Synthetic oligonucleotide
  source 1..36: mol_type = other RNA

SEQ ID NO: 1223 - RNA, 22 nt, synthetic construct
  misc_feature 1..22: note = Description of Artificial Sequence: Synthetic oligonucleotide
  source 1..22: mol_type = other RNA
tctgagcttggtgatgtccagg

SEQ ID NO: 1224 - RNA, 36 nt, synthetic construct; identical to SEQ ID NO: 843
  misc_feature 1..36: note = Description of Artificial Sequence: Synthetic oligonucleotide
  source 1..36: mol_type = other RNA

SEQ ID NO: 1225 - RNA, 22 nt, synthetic construct
  misc_feature 1..22: note = Description of Artificial Sequence: Synthetic oligonucleotide
  source 1..22: mol_type = other RNA
ttatccacctttgtctttcagg

SEQ ID NO: 1226 - RNA, 36 nt, synthetic construct; identical to SEQ ID NO: 847
  misc_feature 1..36: note = Description of Artificial Sequence: Synthetic oligonucleotide
  source 1..36: mol_type = other RNA

SEQ ID NO: 1227 - RNA, 22 nt, synthetic construct
  misc_feature 1..22: note = Description of Artificial Sequence: Synthetic oligonucleotide
  source 1..22: mol_type = other RNA
tatgtatccacctttgtcttgg

SEQ ID NO: 1228 - RNA, 36 nt, synthetic construct; identical to SEQ ID NO: 849
  misc_feature 1..36: note = Description of Artificial Sequence: Synthetic oligonucleotide
  source 1..36: mol_type = other RNA

SEQ ID NO: 1229 - RNA, 22 nt, synthetic construct
  misc_feature 1..22: note = Description of Artificial Sequence: Synthetic oligonucleotide
  source 1..22: mol_type = other RNA
tcatgtatccacctttgtctgg

SEQ ID NO: 1230 - RNA, 36 nt, synthetic construct; identical to SEQ ID NO: 867
  misc_feature 1..36: note = Description of Artificial Sequence: Synthetic oligonucleotide
  source 1..36: mol_type = other RNA

SEQ ID NO: 1231 - RNA, 22 nt, synthetic construct
  misc_feature 1..22: note = Description of Artificial Sequence: Synthetic oligonucleotide
  source 1..22: mol_type = other RNA
ttgcaaatcttgctcatgtagg

SEQ ID NO: 1232 - RNA, 36 nt, synthetic construct; identical to SEQ ID NO: 871
  misc_feature 1..36: note = Description of Artificial Sequence: Synthetic oligonucleotide
  source 1..36: mol_type = other RNA

SEQ ID NO: 1233 - RNA, 22 nt, synthetic construct
  misc_feature 1..22: note = Description of Artificial Sequence: Synthetic oligonucleotide
  source 1..22: mol_type = other RNA
taagttgcaaatcttgctcagg

SEQ ID NO: 1234 - RNA, 36 nt, synthetic construct; identical to SEQ ID NO: 881
  misc_feature 1..36: note = Description of Artificial Sequence: Synthetic oligonucleotide
  source 1..36: mol_type = other RNA

SEQ ID NO: 1235 - RNA, 22 nt, synthetic construct
  misc_feature 1..22: note = Description of Artificial Sequence: Synthetic oligonucleotide
  source 1..22: mol_type = other RNA
tgtagcaagttgcaaatcttgg

SEQ ID NO: 1236 - RNA, 36 nt, synthetic construct; identical to SEQ ID NO: 903
  misc_feature 1..36: note = Description of Artificial Sequence: Synthetic oligonucleotide
  source 1..36: mol_type = other RNA

SEQ ID NO: 1237 - RNA, 22 nt, synthetic construct
  misc_feature 1..22: note = Description of Artificial Sequence: Synthetic oligonucleotide
  source 1..22: mol_type = other RNA
tcagtctctggacaatcgcagg

SEQ ID NO: 1238 - RNA, 36 nt, synthetic construct; identical to SEQ ID NO: 1005
  misc_feature 1..36: note = Description of Artificial Sequence: Synthetic oligonucleotide
  source 1..36: mol_type = other RNA

SEQ ID NO: 1239 - RNA, 22 nt, synthetic construct
  misc_feature 1..22: note = Description of Artificial Sequence: Synthetic oligonucleotide
  source 1..22: mol_type = other RNA
ttattttagttaggtgaaaagg

SEQ ID NO: 1240 - RNA, 36 nt, synthetic construct; identical to SEQ ID NO: 939
  misc_feature 1..36: note = Description of Artificial Sequence: Synthetic oligonucleotide
  source 1..36: mol_type = other RNA

SEQ ID NO: 1241 - RNA, 22 nt, synthetic construct
  misc_feature 1..22: note = Description of Artificial Sequence: Synthetic oligonucleotide
  source 1..22: mol_type = other RNA
taaaaccaactcagctcagagg

SEQ ID NO: 1242 - RNA, 36 nt, synthetic construct; identical to SEQ ID NO: 1001
  misc_feature 1..36: note = Description of Artificial Sequence: Synthetic oligonucleotide
  source 1..36: mol_type = other RNA

SEQ ID NO: 1243 - RNA, 22 nt, synthetic construct
  misc_feature 1..22: note = Description of Artificial Sequence: Synthetic oligonucleotide
  source 1..22: mol_type = other RNA
tttagttaggtgaaaaaggtgg

SEQ ID NO: 1244 - RNA, 36 nt, synthetic construct; identical to SEQ ID NO: 1003
  misc_feature 1..36: note = Description of Artificial Sequence: Synthetic oligonucleotide
  source 1..36: mol_type = other RNA

SEQ ID NO: 1245 - RNA, 22 nt, synthetic construct
  misc_feature 1..22: note = Description of Artificial Sequence: Synthetic oligonucleotide
  source 1..22: mol_type = other RNA
tttttagttaggtgaaaaaggg

SEQ ID NO: 1246 - RNA, 36 nt, synthetic construct; identical to SEQ ID NO: 1007
  misc_feature 1..36: note = Description of Artificial Sequence: Synthetic oligonucleotide
  source 1..36: mol_type = other RNA

SEQ ID NO: 1247 - RNA, 22 nt, synthetic construct
  misc_feature 1..22: note = Description of Artificial Sequence: Synthetic oligonucleotide
  source 1..22: mol_type = other RNA
tattattttagttaggtgaagg

SEQ ID NO: 1248 - RNA, 36 nt, synthetic construct; identical to SEQ ID NO: 1011
  misc_feature 1..36: note = Description of Artificial Sequence: Synthetic oligonucleotide
  source 1..36: mol_type = other RNA

SEQ ID NO: 1249 - RNA, 22 nt, synthetic construct
  misc_feature 1..22: note = Description of Artificial Sequence: Synthetic oligonucleotide
  source 1..22: mol_type = other RNA
tacattattttagttaggtggg

SEQ ID NO: 1250 - RNA, 36 nt, synthetic construct; identical to SEQ ID NO: 1017
  misc_feature 1..36: note = Description of Artificial Sequence: Synthetic oligonucleotide
  source 1..36: mol_type = other RNA

SEQ ID NO: 1251 - RNA, 22 nt, synthetic construct
  misc_feature 1..22: note = Description of Artificial Sequence: Synthetic oligonucleotide
  source 1..22: mol_type = other RNA
ttaaacattattttagttaggg

SEQ ID NO: 1252 - RNA, 36 nt, synthetic construct; identical to SEQ ID NO: 999
  misc_feature 1..36: note = Description of Artificial Sequence: Synthetic oligonucleotide
  source 1..36: mol_type = other RNA

SEQ ID NO: 1253 - RNA, 22 nt, synthetic construct
  misc_feature 1..22: note = Description of Artificial Sequence: Synthetic oligonucleotide
  source 1..22: mol_type = other RNA
ttagttaggtgaaaaaggtggg

SEQ ID NO: 1254 - RNA, 36 nt, synthetic construct; identical to SEQ ID NO: 937
  misc_feature 1..36: note = Description of Artificial Sequence: Synthetic oligonucleotide
  source 1..36: mol_type = other RNA

SEQ ID NO: 1255 - RNA, 22 nt, synthetic construct
  misc_feature 1..22: note = Description of Artificial Sequence: Synthetic oligonucleotide
  source 1..22: mol_type = other RNA
taaaccaactcagctcagaggg

SEQ ID NO: 1256 - RNA, 36 nt, synthetic construct; identical to SEQ ID NO: 925
  misc_feature 1..36: note = Description of Artificial Sequence: Synthetic oligonucleotide
  source 1..36: mol_type = other RNA

SEQ ID NO: 1257 - RNA, 22 nt, synthetic construct
  misc_feature 1..22: note = Description of Artificial Sequence: Synthetic oligonucleotide
  source 1..22: mol_type = other RNA
tatgggaaactttagcacctgg

SEQ ID NO: 1258 - RNA, 36 nt, synthetic construct; identical to SEQ ID NO: 1035
  misc_feature 1..36: note = Description of Artificial Sequence: Synthetic oligonucleotide
  source 1..36: mol_type = other RNA

SEQ ID NO: 1259 - RNA, 22 nt, synthetic construct
  misc_feature 1..22: note = Description of Artificial Sequence: Synthetic oligonucleotide
  source 1..22: mol_type = other RNA
tttccttacatttttatacagg

SEQ ID NO: 1260 - RNA, 36 nt, synthetic construct; identical to SEQ ID NO: 1057
  misc_feature 1..36: note = Description of Artificial Sequence: Synthetic oligonucleotide
  source 1..36: mol_type = other RNA

SEQ ID NO: 1261 - RNA, 22 nt, synthetic construct
  misc_feature 1..22: note = Description of Artificial Sequence: Synthetic oligonucleotide
  source 1..22: mol_type = other RNA
tacatctcactgattcacatgg

SEQ ID NO: 1262 - RNA, 36 nt, synthetic construct; identical to SEQ ID NO: 899
  misc_feature 1..36: note = Description of Artificial Sequence: Synthetic oligonucleotide
  source 1..36: mol_type = other RNA

SEQ ID NO: 1263 - RNA, 22 nt, synthetic construct
  misc_feature 1..22: note = Description of Artificial Sequence: Synthetic oligonucleotide
  source 1..22: mol_type = other RNA
tcataagacattatcctaatgg

SEQ ID NO: 1264 - RNA, 36 nt, synthetic construct; identical to SEQ ID NO: 997
  misc_feature 1..36: note = Description of Artificial Sequence: Synthetic oligonucleotide
  source 1..36: mol_type = other RNA

SEQ ID NO: 1265 - RNA, 22 nt, synthetic construct
  misc_feature 1..22: note = Description of Artificial Sequence: Synthetic oligonucleotide
  source 1..22: mol_type = other RNA
tagttaggtgaaaaaggtgtgg

SEQ ID NO: 1266 - RNA, 36 nt, synthetic construct; identical to SEQ ID NO: 777
  misc_feature 1..36: note = Description of Artificial Sequence: Synthetic oligonucleotide
  source 1..36: mol_type = other RNA

SEQ ID NO: 1267 - RNA, 22 nt, synthetic construct
  misc_feature 1..22: note = Description of Artificial Sequence: Synthetic oligonucleotide
  source 1..22: mol_type = other RNA
taagggtacgttgtcactcagg

SEQ ID NO: 1268 - RNA, 36 nt, synthetic construct; identical to SEQ ID NO: 829
  misc_feature 1..36: note = Description of Artificial Sequence: Synthetic oligonucleotide
  source 1..36: mol_type = other RNA

SEQ ID NO: 1269 - RNA, 22 nt, synthetic construct
  misc_feature 1..22: note = Description of Artificial Sequence: Synthetic oligonucleotide
  source 1..22: mol_type = other RNA
ttgtctttcatttcttcactgg

SEQ ID NO: 1270 - RNA, 36 nt, synthetic construct; identical to SEQ ID NO: 827
  misc_feature 1..36: note = Description of Artificial Sequence: Synthetic oligonucleotide
  source 1..36: mol_type = other RNA

SEQ ID NO: 1271 - RNA, 22 nt, synthetic construct
  misc_feature 1..22: note = Description of Artificial Sequence: Synthetic oligonucleotide
  source 1..22: mol_type = other RNA
tatccatcccttctgaggatgg

SEQ ID NO: 1272 - RNA, 36 nt, synthetic construct; identical to SEQ ID NO: 783
  misc_feature 1..36: note = Description of Artificial Sequence: Synthetic oligonucleotide
  source 1..36: mol_type = other RNA

SEQ ID NO: 1273 - RNA, 22 nt, synthetic construct
  misc_feature 1..22: note = Description of Artificial Sequence: Synthetic oligonucleotide
  source 1..22: mol_type = other RNA
taatgaagggtacgttgtcagg

SEQ ID NO: 1274 - RNA, 36 nt, synthetic construct; identical to SEQ ID NO: 857
  misc_feature 1..36: note = Description of Artificial Sequence: Synthetic oligonucleotide
  source 1..36: mol_type = other RNA

SEQ ID NO: 1275 - RNA, 22 nt, synthetic construct
  misc_feature 1..22: note = Description of Artificial Sequence: Synthetic oligonucleotide
  source 1..22: mol_type = other RNA
tcttgctcatgtatccacctgg

SEQ ID NO: 1276 - RNA, 36 nt, synthetic construct; identical to SEQ ID NO: 889
  misc_feature 1..36: note = Description of Artificial Sequence: Synthetic oligonucleotide
  source 1..36: mol_type = other RNA

SEQ ID NO: 1277 - RNA, 22 nt, synthetic construct
  misc_feature 1..22: note = Description of Artificial Sequence: Synthetic oligonucleotide
  source 1..22: mol_type = other RNA
ttaatgggtagcaagttgcagg

SEQ ID NO: 1278 - RNA, 36 nt, synthetic construct; identical to SEQ ID NO: 879
  misc_feature 1..36: note = Description of Artificial Sequence: Synthetic oligonucleotide
  source 1..36: mol_type = other RNA

SEQ ID NO: 1279 - RNA, 22 nt, synthetic construct
  misc_feature 1..22: note = Description of Artificial Sequence: Synthetic oligonucleotide
  source 1..22: mol_type = other RNA
ttagcaagttgcaaatcttggg

SEQ ID NO: 1280 - RNA, 36 nt, synthetic construct; identical to SEQ ID NO: 915
  misc_feature 1..36: note = Description of Artificial Sequence: Synthetic oligonucleotide
  source 1..36: mol_type = other RNA

SEQ ID NO: 1281 - RNA, 22 nt, synthetic construct
  misc_feature 1..22: note = Description of Artificial Sequence: Synthetic oligonucleotide
  source 1..22: mol_type = other RNA
ttgaaaaactgggaaaggtggg

SEQ ID NO: 1282 - RNA, 36 nt, synthetic construct; identical to SEQ ID NO: 887
  misc_feature 1..36: note = Description of Artificial Sequence: Synthetic oligonucleotide
  source 1..36: mol_type = other RNA

SEQ ID NO: 1283 - RNA, 22 nt, synthetic construct
  misc_feature 1..22: note = Description of Artificial Sequence: Synthetic oligonucleotide
  source 1..22: mol_type = other RNA
taatgggtagcaagttgcaagg

SEQ ID NO: 1284 - RNA, 36 nt, synthetic construct; identical to SEQ ID NO: 895
  misc_feature 1..36: note = Description of Artificial Sequence: Synthetic oligonucleotide
  source 1..36: mol_type = other RNA

SEQ ID NO: 1285 - RNA, 22 nt, synthetic construct
  misc_feature 1..22: note = Description of Artificial Sequence: Synthetic oligonucleotide
  source 1..22: mol_type = other RNA
ttatcctaatgggtagcaaggg

SEQ ID NO: 1286 - RNA, 36 nt, synthetic construct; identical to SEQ ID NO: 841
  misc_feature 1..36: note = Description of Artificial Sequence: Synthetic oligonucleotide
  source 1..36: mol_type = other RNA

SEQ ID NO: 1287 - RNA, 22 nt, synthetic construct
  misc_feature 1..22: note = Description of Artificial Sequence: Synthetic oligonucleotide
  source 1..22: mol_type = other RNA
tatccacctttgtctttcatgg

SEQ ID NO: 1288 - RNA, 36 nt, synthetic construct; identical to SEQ ID NO: 781
  misc_feature 1..36: note = Description of Artificial Sequence: Synthetic oligonucleotide
  source 1..36: mol_type = other RNA

SEQ ID NO: 1289 - RNA, 22 nt, synthetic construct
  misc_feature 1..22: note = Description of Artificial Sequence: Synthetic oligonucleotide
  source 1..22: mol_type = other RNA
ttgaagggtacgttgtcactgg

SEQ ID NO: 1290 - RNA, 36 nt, synthetic construct; identical to SEQ ID NO: 799
  misc_feature 1..36: note = Description of Artificial Sequence: Synthetic oligonucleotide
  source 1..36: mol_type = other RNA

SEQ ID NO: 1291 - RNA, 22 nt, synthetic construct
  misc_feature 1..22: note = Description of Artificial Sequence: Synthetic oligonucleotide
  source 1..22: mol_type = other RNA
tccacatgaagaaagttcgtgg

SEQ ID NO: 1292 - RNA, 36 nt, synthetic construct; identical to SEQ ID NO: 805
  misc_feature 1..36: note = Description of Artificial Sequence: Synthetic oligonucleotide
  source 1..36: mol_type = other RNA

SEQ ID NO: 1293 - RNA, 22 nt, synthetic construct
  misc_feature 1..22: note = Description of Artificial Sequence: Synthetic oligonucleotide
  source 1..22: mol_type = other RNA
ttgatgtccacatgaagaaagg

SEQ ID NO: 1294 - RNA, 36 nt, synthetic construct; identical to SEQ ID NO: 811
  misc_feature 1..36: note = Description of Artificial Sequence: Synthetic oligonucleotide
  source 1..36: mol_type = other RNA

SEQ ID NO: 1295 - RNA, 22 nt, synthetic construct
  misc_feature 1..22: note = Description of Artificial Sequence: Synthetic oligonucleotide
  source 1..22: mol_type = other RNA
tgagcttggtgatgtccacagg

SEQ ID NO: 1296 - RNA, 36 nt, synthetic construct; identical to SEQ ID NO: 813
  misc_feature 1..36: note = Description of Artificial Sequence: Synthetic oligonucleotide
  source 1..36: mol_type = other RNA

SEQ ID NO: 1297 - RNA, 22 nt, synthetic construct
  misc_feature 1..22: note = Description of Artificial Sequence: Synthetic oligonucleotide
  source 1..22: mol_type = other RNA
ttgagcttggtgatgtccacgg

SEQ ID NO: 1298 - RNA, 36 nt, synthetic construct; identical to SEQ ID NO: 817
  misc_feature 1..36: note = Description of Artificial Sequence: Synthetic oligonucleotide
  source 1..36: mol_type = other RNA

SEQ ID NO: 1299 - RNA, 22 nt, synthetic construct
  misc_feature 1..22: note = Description of Artificial Sequence: Synthetic oligonucleotide
  source 1..22: mol_type = other RNA
ttatcctcgaaggcatatctgg

SEQ ID NO: 1300 - RNA, 36 nt, synthetic construct; identical to SEQ ID NO: 1210
  misc_feature 1..36: note = Description of Artificial Sequence: Synthetic oligonucleotide
  source 1..36: mol_type = other RNA

SEQ ID NO: 1301 - RNA, 22 nt, synthetic construct
  misc_feature 1..22: note = Description of Artificial Sequence: Synthetic oligonucleotide
  source 1..22: mol_type = other RNA
tattcaacaggtaacaacgcgg

SEQ ID NO: 1302 - RNA, 58 nt, synthetic construct
  misc_feature 1..58: note = Description of Artificial Sequence: Synthetic oligonucleotide
  misc_difference 1..19: note = modified_base - a, c, u, g, unknown or other
  misc_difference 38..56: note = modified_base - a, c, u, g, unknown or other
  source 1..58: mol_type = other RNA
nnnnnnnnnnnnnnnnnnnagcagccgaaaggctgctnnnnnnnnnnnnnnnnnnngg

SEQ ID NO: 1303 - RNA, 36 nt, synthetic construct
  misc_feature 1..36: note = Description of Artificial Sequence: Synthetic oligonucleotide
  misc_difference 1..19: note = modified_base - a, c, u, g, unknown or other
  source 1..36: mol_type = other RNA
nnnnnnnnnnnnnnnnnnnagcagccgaaaggctgc

The invention claimed is:

1. An RNAi oligonucleotide for reducing PNPLA3 expression, the oligonucleotide comprising a sense strand and an antisense strand, wherein the sense strand and the antisense strand form a duplex region, wherein the antisense strand comprises a region of complementarity to a PNPLA3 mRNA target sequence of any one of SEQ ID NOS:1167 to 1176, and wherein the region of complementarity is at least 15 contiguous nucleotides in length.

2. The RNAi oligonucleotide of claim 1, wherein the sense strand is 15 to 50 nucleotides in length.

3. The RNAi oligonucleotide of claims 1 or 2, wherein the sense strand is 18 to 36 nucleotides in length.

4. The RNAi oligonucleotide of any one of claims 1 to 3, wherein the antisense strand is 15 to 30 nucleotides in length.

5. The RNAi oligonucleotide of any one of claims 1 to 4, wherein the antisense strand is 22 nucleotides in length and where in the antisense strand and the sense strand form a duplex region of at least 19 nucleotides in length, optionally at least 20 nucleotides in length.

6. The RNAi oligonucleotide of any one of claims 1 to 5, wherein the region of complementarity is at least 19 contiguous nucleotide in length, optionally at least 20 nucleotides in length.

7. The RNAi oligonucleotide of any one of claims 1 to 6, wherein the 3′ end of the sense strand comprises a stem-loop set forth as S1-L-S2, wherein S1 is complementarity to S2, and wherein L forms a loop between S1 and S2 of 3 to 5 nucleotides in length.

8. An RNAi oligonucleotide for reducing PNPLA3 expression, the oligonucleotide comprising a sense strand of 15 to 50 nucleotides in length and an antisense strand, wherein the sense strand and the antisense strand form a duplex region, wherein the wherein the antisense strand comprises a region of complementarity to a PNPLA3 mRNA target sequence of any one of SEQ ID NOS:1167 to 1176, and wherein the region of complementarity is at least 15 contiguous nucleotides in length.

9. An RNAi oligonucleotide for reducing PNPLA3 expression, the oligonucleotide comprising a sense strand of 15 to 50 nucleotides in length and an antisense strand of 15 to 30 nucleotides in length, wherein the sense strand and the antisense strand form a duplex region, wherein the antisense strand comprises a region of complementarity to a PNPLA3 mRNA target sequence of any one of SEQ ID NOS:1167 to 1176, and wherein the region of complementarity is at least 15 contiguous nucleotides in length.

10. An RNAi oligonucleotide for reducing PNPLA3 expression, the oligonucleotide comprising a sense strand of 15 to 50 nucleotides in length and an antisense strand, wherein the sense strand and the antisense strand form a duplex region, wherein the antisense strand comprises a region of complementarity to a PNPLA3 mRNA target sequence of any one of SEQ ID NOS:1167 to 1176, and wherein the region of complementarity is 19 contiguous nucleotides in length, optionally 20 nucleotides in length.

11. An RNAi oligonucleotide for reducing PNPLA3 expression, the oligonucleotide comprising a sense strand of 18 to 36 nucleotides in length and an antisense strand, wherein the sense strand and the antisense strand form a duplex region, wherein the antisense strand comprises a region of complementarity to a PNPLA3 mRNA target sequence of any one of SEQ ID NOS:1167 to 1176, and wherein the region of complementarity is 19 contiguous nucleotides in length, optionally 20 nucleotides in length.

12. An RNAi oligonucleotide for reducing PNPLA3 expression, the oligonucleotide comprising a sense strand of 18 to 36 nucleotides in length and an antisense strand of 22 nucleotides in length, wherein the sense strand and the antisense strand form a duplex region, wherein the antisense strand comprises a region of complementarity to a PNPLA3 mRNA target sequence of any one of SEQ ID NOS:1167 to 1176, and wherein the region of complementarity is 19 contiguous nucleotides in length, optionally 20 nucleotides in length.

13. An RNAi oligonucleotide for reducing PNPLA3 expression, the oligonucleotide comprising a sense strand of 18 to 36 nucleotides in length and an antisense strand of 22 nucleotides in length, wherein the sense strand and the antisense strand form a duplex region, wherein the 3′ end of the sense strand comprises a stem-loop set forth as S1-L-S2, wherein S1 is complementary to S2, and wherein L forms a loop between S1 and S2 of 3 to 5 nucleotides in length, wherein the antisense strand comprises a region of complementarity to a PNPLA3 mRNA target sequence of any one of SEQ ID NOS:1167 to 1176, and wherein the region of complementarity is 19 contiguous nucleotides in length, optionally 20 nucleotides in length.

14. An RNAi oligonucleotide for reducing PNPLA3 expression, the oligonucleotide comprising a sense strand of 36 nucleotides in length and an antisense strand of 22 nucleotides in length, wherein the sense strand and the antisense strand form a duplex region, wherein the 3′ end of the sense strand comprises a stem-loop set forth as S1-L-S2, wherein S1 is complementary to S2, and wherein L forms a loop between S1 and S2 of 3 to 5 nucleotides in length, wherein the antisense strand comprises a region of complementarity to a PNPLA3 mRNA target sequence of any one of SEQ ID NOS:1167 to 1176, and wherein the region of complementarity is 19 contiguous nucleotides in length, optionally 20 nucleotides in length.

15. An RNAi oligonucleotide for reducing PNPLA3 expression, the oligonucleotide comprising a sense strand of 36 nucleotides in length and an antisense strand of 22 nucleotides in length, wherein the sense strand and the antisense strand form a duplex region of at least 19 nucleotides in length, optionally 20 nucleotides in length, wherein the 3′ end of the sense strand comprises a stem-loop set forth as S1-L-S2, wherein S1 is complementary to S2, and wherein L forms a loop between S1 and S2 of 3 to 5 nucleotides in length, wherein the antisense strand comprises a region of complementarity to a PNPLA3 mRNA target sequence of any one of SEQ ID NOS:1167 to 1176, and wherein the region of complementarity is 19 contiguous nucleotides in length, optionally 20 nucleotides in length.

16. The RNAi oligonucleotide of any one of claims 7 and 13 to 15, wherein L is a triloop or a tetraloop.

17. The RNAi oligonucleotide of claim 16, wherein L is a tetraloop.

18. The RNAi oligonucleotide of claim 17, wherein the tetraloop comprises the sequence 5′-GAAA-3′.

19. The RNAi oligonucleotide of any one of claims 16 to 18, wherein S1 and S2 are 1-10 nucleotides in length and have the same length.

20. The RNAi oligonucleotide of claim 19, wherein S1 and S2 are 1 nucleotide, 2 nucleotides, 3 nucleotides, 4 nucleotides, 5 nucleotides, 6 nucleotides, 7 nucleotides, 8 nucleotides, 9 nucleotides, or 10 nucleotides in length.

21. The RNAi oligonucleotide of claim 20, wherein S1 and S2 are 6 nucleotides in length.

22. The RNAi oligonucleotide of any one of claims 16 to 21, wherein the stem-loop comprises the sequence 5′-GCAGCCGAAAGGCUGC-3′ (SEQ ID NO:1177).

23. The RNAi oligonucleotide of any one of claims 1 to 22, wherein the antisense strand comprises a 3′ overhang sequence of one or more nucleotides in length.

24. The RNAi oligonucleotide of claim 23, wherein the 3′ overhang sequence is 2 nucleotides in length, optionally wherein the 3′ overhang sequence is GG.

25. The RNAi oligonucleotide of any one of the preceding claims, wherein the oligonucleotide comprises at least one modified nucleotide.

26. The RNAi oligonucleotide of claim 25, wherein the modified nucleotide comprises a 2′-modification.

27. The RNAi oligonucleotide of claim 26, wherein the 2′-modification is a modification selected from the group consisting of 2′-aminoethyl, 2′-fluoro, 2′-O-methyl, 2′-O-methoxyethyl, and 2′-deoxy-2′-fluoro-β-d-arabinonucleic acid.

28. The RNAi oligonucleotide of any one of claims 25 to 27, wherein all nucleotides comprising the oligonucleotide are modified, optionally wherein the modification is a 2′-modification selected from the group consisting of 2′-fluoro and 2′-O-methyl.

29. The RNAi oligonucleotide of any one of the preceding claims, wherein the oligonucleotide comprises at least one modified internucleotide linkage.

30. The RNAi oligonucleotide of claim 29, wherein the at least one modified internucleotide linkage is a phosphorothioate linkage.

31. The RNAi oligonucleotide of any one of the preceding claims, wherein the 4′-carbon of the sugar of the 5′-nucleotide of the antisense strand comprises a phosphate analog.

32. The RNAi oligonucleotide of claim 31, wherein the phosphate analog is oxymethylphosphonate, vinylphosphonate or malonylphosphonate, optionally wherein the phosphate analog is a 4′-phosphate analog comprising 5′-methoxyphosphonate-4′-oxy.

33. The RNAi oligonucleotide of any one of the preceding claims, wherein at least one nucleotide of the oligonucleotide is conjugated to one or more targeting ligands.

34. The RNAi oligonucleotide of claim 33, wherein each targeting ligand comprises a carbohydrate, amino sugar, cholesterol, polypeptide, or lipid.

35. The RNAi oligonucleotide of claim 33, wherein each targeting ligand comprises a N-acetylgalactosamine (GalNAc) moiety.

36. The RNAi oligonucleotide of claim 35, wherein the GalNAc moiety is a monovalent GalNAc moiety, a bivalent GalNAc moiety, a trivalent GalNAc moiety, or a tetravalent GalNAc moiety.

37. The RNAi oligonucleotide of any one of claims 16 to 32, wherein up to 4 nucleotides of L of the stem-loop are each conjugated to a monovalent GalNAc moiety.

38. The RNAi oligonucleotide of any one of claims 1 to 37, wherein the sense strand comprises a nucleotide sequence of any one of SEQ ID NOs: 9, 11, 13, 15, 17, 19, 21, 23, 25, 27, 29, 31, 33, 35, 37, 39, 41, 43, 45, 47, 49, 51, 53, 55, 57, 59, 61, 63, 65, 67, 69, 71, 73, 75, 77, 79, 81, 83, 85, 87, 89, 91, 93, 95, 97, 99, 101, 103, 105, 107, 109, 111, 113, 115, 117, 119, 121, 123, 125, 127, 129, 131, 133, 135, 137, 139, 141, 143, 145, 147, 149, 151, 153, 155, 157, 159, 161, 163, 165, 167, 169, 171, 173, 175, 177, 179, 181, 183, 185, 187, 189, 191, 193, 195, 197, 199, 201, 203, 205, 207, 209, 211, 213, 215, 217, 219, 221, 223, 225, 227, 229, 231, 233, 235, 237, 239, 241, 243, 245, 247, 249, 251, 253, 255, 257, 259, 261, 263, 265, 267, 269, 271, 273, 275, 277, 279, 281, 283, 285, 287, 289, 291, 293, 295, 297, 299, 301, 303, 305, 307, 309, 311, 313, 315, 317, 319, 321, 323, 325, 327, 329, 331, 333, 335, 337, 339, 341, 343, 345, 347, 349, 351, 353, 355, 357, 359, 361, 363, 365, 367, 369, 371, 373, 375, 377, 379, 381, 383, 385, 387, 389, 391, 393, 395, 397, 399, 401, 403, 405, 407, 409, 411, 413, 415, 417, 419, 421, 423, 425, 427, 429, 431, 433, 435, 437, 439, 441, 443, 445, 447, 449, 451, 453, 455, 457, 459, 461, 463, 465, 467, 469, 471, 473, 475, 477, 479, 481, 483, 485, 487, 489, 491, 493, 495, 497, 499, 501, 503, 505, 507, 509, 511, 513, 515, 517, 519, 521, 523, 525, 527, 529, 531, 533, 535, 537, 539, 541, 543, 545, 547, 549, 551, 553, 555, 557, 559, 561, 563, 565, 567, 569, 571, 573, 575, 577, 579, 581, 583, 585, 587, 589, 591, 593, 595, 597, 599, 601, 603, 605, 607, 609, 611, 613, 615, 617, 619, 621, 623, 625, 627, 629, 631, 633, 635, 637, 639, 641, 643, 645, 647, 649, 651, 653, 655, 657, 659, 661, 663, 665, 667, 669, 671, 673, 675, 677, 679, 681, 683, 685, 687, 689, 691, 693, 695, 697, 699, 701, 703, 705, 707, 709, 711, 713, 715, 717, 719, 721, 723, 725, 727, 729, 731, 733, 735, 737, 739, 741, 743, 745, 747, 749, 751, 753, 755, 757, 759, 761, 763, 765, 767, 769, 771, 773, and 775, or
wherein the sense strand comprises a nucleotide sequence of any one of SEQ ID NOs:777, 779, 781, 783, 785, 787, 789, 791, 793, 795, 797, 799, 801, 803, 805, 807, 809, 811, 813, 815, 817, 819, 821, 823, 825, 827, 829, 831, 833, 835, 837, 839, 841, 843, 845, 847, 849, 851, 853, 855, 857, 859, 861, 863, 865, 867, 869, 871, 873, 875, 877, 879, 881, 883, 885, 887, 889, 891, 893, 895, 897, 899, 901, 903, 905, 907, 909, 911, 913, 915, 917, 919, 921, 923, 925, 927, 929, 931, 933, 935, 937, 939, 941, 943, 945, 947, 949, 951, 953, 955, 957, 959, 961, 963, 965, 967, 969, 971, 973, 975, 977, 979, 981, 983, 985, 987, 989, 991, 993, 995, 997, 999, 1001, 1003, 1005, 1007, 1009, 1011, 1013, 1015, 1017, 1019, 1021, 1023, 1025, 1027, 1029, 1031, 1033, 1035, 1037, 1039, 1041, 1043, 1045, 1047, 1049, 1051, 1053, 1055, 1057, 1059, 1061, 1063, 1065, 1067, 1069, 1071, 1073, 1075, 1077, 1079, 1081, 1083, 1085, 1087, 1089, 1091, 1093, 1095, 1097, 1099, 1101, 1103, 1105, 1107, 1109, 1111, 1113, 1115, 1117, 1119, 1121, 1123, 1125, 1127, 1129, 1131, 1133, 1135, 1137, 1139, 1141, 1143, 1145, 1147, 1149, 1151, 1153, 1155, 1157, 1159, 1161, and 1163 or wherein the sense strand comprises a nucleotide sequence of any one of SEQ ID NOs: 1178, 1180, 1182, 1184, 1186, 1188, 1190, 1192, 1194, 1196, 1198, 1200, 1202, 1204, 1206, 1208, 1210, 1212, 1214, 1216, 1218, 1220, 1222, 1224, 1226, 1228, 1230, 1232, 1234, 1236, 1238, 1240, 1242, 1244, 1246, 1248, 1250, 1252, 1254, 1256, 1258, 1260, 1262, 1264, 1266, 1268, 1270, 1272, 1274, 1276, 1278, 1280, 1282, 1284, 1286, 1288, 1290, 1292, 1294, 1296, 1298 or 1300.

39. The RNAi oligonucleotide of any one of claims 1 to 38, wherein the antisense strand comprises a nucleotide sequence of any one of SEQ ID NOs:10, 12, 14, 16, 18, 20, 22, 24, 26, 28, 30, 32, 34, 36, 38, 40, 42, 44, 46, 48, 50, 52, 54, 56, 58, 60, 62, 64, 66, 68, 70, 72, 74, 76, 78, 80, 82, 84, 86, 88, 90, 92, 94, 96, 98, 100, 102, 104, 106, 108, 110, 112, 114, 116, 118, 120, 122, 124, 126, 128, 130, 132, 134, 136, 138, 140, 142, 144, 146, 148, 150, 152, 154, 156, 158, 160, 162, 164, 166, 168, 170, 172, 174, 176, 178, 180, 182, 184, 186, 188, 190, 192, 194, 196, 198, 200, 202, 204, 206, 208, 210, 212, 214, 216, 218, 220, 222, 224, 226, 228, 230, 232, 234, 236, 238, 240, 242, 244, 246, 248, 250, 252, 254, 256, 258, 260, 262, 264, 266, 268, 270, 272, 274, 276, 278, 280, 282, 284, 286, 288, 290, 292, 294, 296, 298, 300, 302, 304, 306, 308, 310, 312, 314, 316, 318, 320, 322, 324, 326, 328, 330, 332, 334, 336, 338, 340, 342, 344, 346, 348, 350, 352, 354, 356, 358, 360, 362, 364, 366, 368, 370, 372, 374, 376, 378, 380, 382, 384, 386, 388, 390, 392, 394, 396, 398, 400, 402, 404, 406, 408, 410, 412, 414, 416, 418, 420, 422, 424, 426, 428, 430, 432, 434, 436, 438, 440, 442, 444, 446, 448, 450, 452, 454, 456, 458, 460, 462, 464, 466, 468, 470, 472, 474, 476, 478, 480, 482, 484, 486, 488, 490, 492, 494, 496, 498, 500, 502, 504, 506, 508, 510, 512, 514, 516, 518, 520, 522, 524, 526, 528, 530, 532, 534, 536, 538, 540, 542, 544, 546, 548, 550, 552, 554, 556, 558, 560, 562, 564, 566, 568, 570, 572, 574, 576, 578, 580, 582, 584, 586, 588, 590, 592, 594, 596, 598, 600, 602, 604, 606, 608, 610, 612, 614, 616, 618, 620, 622, 624, 626, 628, 630, 632, 634, 636, 638, 640, 642, 644, 646, 648, 650, 652, 654, 656, 658, 660, 662, 664, 666, 668, 670, 672, 674, 676, 678, 680, 682, 684, 686, 688, 690, 692, 694, 696, 698, 700, 702, 704, 706, 708, 710, 712, 714, 716, 718, 720, 722, 724, 726, 728, 730, 732, 734, 736, 738, 740, 742, 744, 746, 748, 750, 752, 754, 756, 758, 760, 762, 764, 766, 768, 770, 772, 774, and 776, or
wherein the antisense strand comprises a nucleotide sequence of any one of SEQ ID NOs:778, 780, 782, 784, 786, 788, 790, 792, 794, 796, 798, 800, 802, 804, 806, 808, 810, 812, 814, 816, 818, 820, 822, 824, 826, 828, 830, 832, 834, 836, 838, 840, 842, 844, 846, 848, 850, 852, 854, 856, 858, 860, 862, 864, 866, 868, 870, 872, 874, 876, 878, 880, 882, 884, 886, 888, 890, 892, 894, 896, 898, 900, 902, 904, 906, 908, 910, 912, 914, 916, 918, 920, 922, 924, 926, 928, 930, 932, 934, 936, 938, 940, 942, 944, 946, 948, 950, 952, 954, 956, 958, 960, 962, 964, 966, 968, 970, 972, 974, 976, 978, 980, 982, 984, 986, 988, 990, 992, 994, 996, 998, 1000, 1002, 1004, 1006, 1008, 1010, 1012, 1014, 1016, 1018, 1020, 1022, 1024, 1026, 1028, 1030, 1032, 1034, 1036, 1038, 1040, 1042, 1044, 1046, 1048, 1050, 1052, 1054, 1056, 1058, 1060, 1062, 1064, 1066, 1068, 1070, 1072, 1074, 1076, 1078, 1080, 1082, 1084, 1086, 1088, 1090, 1092, 1094, 1096, 1098, 1100, 1102, 1104, 1106, 1108, 1110, 1112, 1114, 1116, 1118, 1120, 1122, 1124, 1126, 1128, 1130, 1132, 1134, 1136, 1138, 1140, 1142, 1144, 1146, 1148, 1150, 1152, 1154, 1156, 1158, 1160, 1162, and 1164;
or wherein the antisense strand comprises a nucleotide sequence of any one of SEQ ID Nos: 1179, 1181, 1183, 1185, 1187, 1189, 1191, 1193, 1195, 1197, 1199, 1201, 1203, 1205, 1207, 1209, 1211, 1213, 1215, 1217, 1219, 1221, 1223, 1225, 1227, 1229, 1231, 1233, 1235, 1237, 1239, 1241, 1243, 1245, 1247, 1249, 1251, 1253, 1255, 1257, 1259, 1261, 1263, 1265, 1267, 1269, 1271, 1273, 1275, 1277, 1279, 1281, 1283, 1285, 1287, 1289, 1291, 1293, 1295, 1297, 1299 or 1301.

40. The RNAi oligonucleotide of any one of claims 1 to 39, wherein the sense strand and antisense strands comprise nucleotide sequences selected from the group consisting of:
(a) SEQ ID NOS:787 and 788,
(b) SEQ ID NOS:843 and 844,
(c) SEQ ID NOS:867 and 868,
(d) SEQ ID NOS:871 and 872,
(e) SEQ ID NOS:937 and 938,
(f) SEQ ID NOS:1003 and 1004,
(g) SEQ ID NOS:1007 and 1008,
(h) SEQ ID NOS:1017 and 1018,
(i) SEQ ID NOS:1161 and 1162,
(j) SEQ ID NOS: 1163 and 1164,
(k) SEQ ID NOs: 1220 and 1221,
(l) SEQ ID NOs: 1224 and 1225,
(m) SEQ ID NOs: 1230 and 1231,
(n) SEQ ID NOs: 1232 and 1233,
(o) SEQ ID NOs: 1188 and 1189,
(p) SEQ ID NOs: 1190 and 1191,
(q) SEQ ID NOs: 1244 and 1245,
(r) SEQ ID NOs: 1250 and 1251-,
(s) SEQ ID NOs: 1254 and 1255, and
(t) SEQ ID NOs: 1246 and 1247.

41. The RNAi oligonucleotide of any one of claims 1 to 39, wherein the sense strand comprises a nucleotide sequence as set forth in SEQ ID NO: 1220 and wherein the antisense strand comprises a nucleotide sequence as set forth in SEQ ID NO:1221.

42. The RNAi oligonucleotide of any one of claims 1 to 39, wherein the sense strand comprises a nucleotide sequence as set forth in SEQ ID NO:1224 and wherein the antisense strand comprises a nucleotide sequence as set forth in SEQ ID NO:1225.

43. The RNAi oligonucleotide of any one of claims 1 to 39, wherein the sense strand comprises a nucleotide sequence as set forth in SEQ ID NO: 1230, and wherein the antisense strand comprises a nucleotide sequence as set forth in SEQ ID NO:1231.

44. The RNAi oligonucleotide of any one of claims 1 to 39, wherein the sense strand comprises a nucleotide sequence as set forth in SEQ ID NO: 1232, and wherein the antisense strand comprises a nucleotide sequence as set forth in SEQ ID NO: 1233.

45. The RNAi oligonucleotide of any one of claims 1 to 39, wherein the sense strand comprises a nucleotide sequence as set forth in SEQ ID NO:1188, and wherein the antisense strand comprises a nucleotide sequence as set forth in SEQ ID NO: 1189.

46. The RNAi oligonucleotide of any one of claims 1 to 39, wherein the sense strand comprises a nucleotide sequence as set forth in SEQ ID NO: 1190, and wherein the antisense strand comprises a nucleotide sequence as set forth in SEQ ID NO:1191.

47. The RNAi oligonucleotide of any one of claims 1 to 39, wherein the sense strand comprises a nucleotide sequence as set forth in SEQ ID NO: 1244, and wherein the antisense strand comprises a nucleotide sequence as set forth in SEQ ID NO: 1245.

48. The RNAi oligonucleotide of any one of claims 1 to 39, wherein the sense strand comprises a nucleotide sequence as set forth in SEQ ID NO: 1250, and wherein the antisense strand comprises a nucleotide sequence as set forth in SEQ ID NO:1251.

49. The RNAi oligonucleotide of any one of claims 1 to 39, wherein the sense strand comprises a nucleotide sequence as set forth in SEQ ID NO: 1254, and wherein the antisense strand comprises a nucleotide sequence as set forth in SEQ ID NO: 1255.

50. The RNAi oligonucleotide of any one of claims 1 to 39, wherein the sense strand comprises a nucleotide sequence as set forth in SEQ ID NO: 1246, and wherein the antisense strand comprises a nucleotide sequence as set forth in SEQ ID NO: 1247.

51. An RNAi oligonucleotide for reducing PNPLA3 expression, the oligonucleotide comprising a sense strand and an antisense strand, wherein the sense strand and the antisense strand form a duplex region, wherein all nucleotides comprising the sense strand and antisense strand are modified, wherein the antisense strand comprises a region of complementarity to a PNPLA3 mRNA target sequence of any one of SEQ ID NOS:1167 to 1176, and wherein the region of complementarity is at least 15 contiguous nucleotides in length.

52. An RNAi oligonucleotide for reducing PNPLA3 expression, the oligonucleotide comprising a sense strand and an antisense strand, wherein the sense strand and the antisense strand form a duplex region, wherein all nucleotides comprising the sense strand and antisense strand are modified, wherein the 4′-carbon of the sugar of the 5′-nucleotide of the antisense strand comprises a phosphate analog, wherein the antisense strand comprises a region of complementarity to a PNPLA3 mRNA target sequence of any one of SEQ ID NOS:1167 to 1176, and wherein the region of complementarity is at least 15 contiguous nucleotides in length.

53. An RNAi oligonucleotide for reducing PNPLA3 expression, the oligonucleotide comprising a sense strand and an antisense strand, wherein the sense strand and the antisense strand form a duplex region, wherein all nucleotides comprising the sense strand and antisense strand are modified, wherein the 4′-carbon of the sugar of the 5′-nucleotide of the antisense strand comprises a phosphate analog, wherein the antisense strand comprises a region of complementarity to a PNPLA3 mRNA target sequence of any one of SEQ ID NOS:1167 to 1176, and wherein the region of complementarity is at least 15 contiguous nucleotides in length.

54. An RNAi oligonucleotide for reducing PNPLA3 expression, the oligonucleotide comprising a sense strand and an antisense strand, wherein the sense strand and the antisense strand form a duplex region, wherein all nucleotides comprising the sense strand and the antisense strand are modified, wherein the antisense strand and the sense strand comprise one or more 2′-fluoro and 2′-O-methyl modified nucleotides and at least one phosphorothioate linkage, wherein the 4′-carbon of the sugar of the 5′-nucleotide of the antisense strand comprises a phosphate analog, wherein the antisense strand comprises a region of complementarity to a PNPLA3 mRNA target sequence of any one of SEQ ID NOs:1167 to 1176, and wherein the region of complementarity is at least 15 contiguous nucleotides in length.

55. The RNAi oligonucleotide of any one of claims 51 to 54, wherein the sense strand comprises of any one of SEQ ID NOs:787, 843, 867, 871, 937, 1003, 1007, 1017, 1161, or 1163, or wherein the sense strand comprises of any one of SEQ ID Nos: 1188, 1190, 1220, 1224, 1230, 1232, 1244, 1246, 1250 or 1254.

56. The RNAi oligonucleotide of any one of claims 51 to 55, wherein the antisense strand comprises of any one of SEQ ID NOs: 788, 844, 868, 872, 938, 1004, 1008, 1018, 1162, or 1164, or wherein the antisense strand comprises of any one of SEQ ID NOs: 1189, 1191, 1221, 1225, 1231, 1233, 1245, 1247, 1251 or 1255.

57. The RNAi oligonucleotide of any one of claims 51 to 56, wherein the sense strand and antisense strands are selected from the group consisting of:
(a) SEQ ID NOS:787 and 788,
(b) SEQ ID NOS:843 and 844,
(c) SEQ ID NOS:867 and 868,
(d) SEQ ID NOS:871 and 872,
(e) SEQ ID NOS:937 and 938,
(f) SEQ ID NOS:1003 and 1004,
(g) SEQ ID NOS:1007 and 1008,
(h) SEQ ID NOS:1017 and 1018,
(i) SEQ ID NOS:1161 and 1162, and
(j) SEQ ID NOS: 1163 and 1164,
(k) SEQ ID NOs: 1220 and 1221,
(l) SEQ ID NOs: 1224 and 1225,
(m) SEQ ID NOs: 1230 and 1231,
(n) SEQ ID NOs: 1232 and 1233,
(o) SEQ ID NOs: 1188 and 1189,
(p) SEQ ID NOs: 1190 and 1191,
(q) SEQ ID NOs: 1244 and 1245,
(r) SEQ ID NOs: 1250 and 1251-,
(s) SEQ ID NOs: 1254 and 1255, and
(t) SEQ ID NOs: 1246 and 1247.

58. The RNAi oligonucleotide of any one of claims 51 to 56, wherein the sense strand comprises SEQ ID NO: 1220 and wherein the antisense strand comprises SEQ ID NO:1221.

59. The RNAi oligonucleotide of any one of claims 51 to 56, wherein the sense strand comprises SEQ ID NO:1224, and wherein the antisense strand comprises SEQ ID NO:1225.

60. The RNAi oligonucleotide of any one of claims 51 to 56, wherein the sense strand comprises SEQ ID NO:1230, and wherein the antisense strand comprises SEQ ID NO:1231.

61. The RNAi oligonucleotide of any one of claims 51 to 56, wherein the sense strand comprises SEQ ID NO:1232, and wherein the antisense strand comprises SEQ ID NO:1233.

62. The RNAi oligonucleotide of any one of claims 51 to 56, wherein the sense strand comprises SEQ ID NO:1188, and wherein the antisense strand comprises SEQ ID NO:1189.

63. The RNAi oligonucleotide of any one of claims 51 to 56, wherein the sense strand comprises SEQ ID NO:1190, and wherein the antisense strand comprises SEQ ID NO:1191.

64. The RNAi oligonucleotide of any one of claims 51 to 56, wherein the sense strand comprises SEQ ID NO:1244, and wherein the antisense strand comprises SEQ ID NO:1245.

65. The RNAi oligonucleotide of any one of claims 51 to 56, wherein the sense strand comprises SEQ ID NO:1250, and wherein the antisense strand comprises SEQ ID NO:1251.

66. The RNAi oligonucleotide of any one of claims 51 to 56, wherein the sense strand comprises SEQ ID NO:1254, and wherein the antisense strand comprises SEQ ID NO:1255.

67. The RNAi oligonucleotide of any one of claims 51 to 56, wherein the sense strand comprises SEQ ID NO:1246, and wherein the antisense strand comprises SEQ ID NO:1247.

68. A method for treating a subject having a disease, disorder or condition associated with PNPLA3 expression, the method comprising administering to the subject a therapeutically effective amount of the RNAi oligonucleotide of any one of the preceding claims, or pharmaceutical composition thereof, thereby treating the subject.

69. A pharmaceutical composition comprising the RNAi oligonucleotide of any one of claims 1 to 67, and a pharmaceutically acceptable carrier, delivery agent or excipient.

70. A method of delivering an oligonucleotide to a subject, the method comprising administering pharmaceutical composition of claim 69 to the subject.

71. A method for reducing PNPLA3 expression in a cell, a population of cells or a subject, the method comprising the step of:
i. contacting the cell or the population of cells with the RNAi oligonucleotide of any one of claims 1 to 67, or the pharmaceutical composition of claim 69; or
ii. administering to the subject the RNAi oligonucleotide of any one of claims 1 to 67, or the pharmaceutical composition of claim 69.

72. The method of claim 71, wherein reducing PNPLA3 expression comprises reducing an amount or level of PNPLA3 mRNA, an amount or level of PNPLA3 protein, or both.

73. The method of claim 71 or 72, wherein the subject has a disease, disorder or condition associated with PNPLA3 expression.

74. The method of claim 73, wherein the disease, disorder or condition associated with PNPLA3 expression is cardiometabolic disease, alcoholic hepatitis (AH), alcoholic liver disease (ALD), cirrhosis, hepatocellular carcinoma (HCC), non-alcoholic fatty liver disease (NAFLD), or non-alcoholic steatohepatitis (NASH).

75. The method of any one of claims 68 and 70 to 74, wherein the RNAi oligonucleotide, or pharmaceutical composition, is administered in combination with a second composition or therapeutic agent.

76. A method for treating a subject having a disease, disorder or condition associated with PNPLA3 expression, the method comprising administering to the subject a therapeutically effective amount of an RNAi oligonucleotide comprising a sense strand and an antisense strand, wherein the sense strand and the antisense strand form a duplex region, wherein the antisense strand comprises a region of complementarity to a PNPLA3 mRNA target sequence of any one of SEQ ID NOS:1167 to 1176, and wherein the region of complementarity is at least 15 contiguous nucleotides in length.

77. A method for treating a subject having a disease, disorder or condition associated with PNPLA3 expression, the method comprising administering to the subject a therapeutically effective amount of an RNAi oligonucleotide comprising a sense strand and an antisense strand selected from a row set forth in Table 1, Table 3, Table A, Table B, Table C or Table D or a pharmaceutical composition thereof, thereby treating the subject.

78. A method for treating a subject having a disease, disorder or condition associated with PNPLA3 expression, the method comprising administering to the subject a therapeutically effective amount of an RNAi oligonucleotide comprising a sense strand and an antisense strand, wherein the sense strand and antisense strands comprise nucleotide sequences selected from the group consisting of:
(a) SEQ ID NOS:787 and 788,
(b) SEQ ID NOS:843 and 844,
(c) SEQ ID NOS:867 and 868,
(d) SEQ ID NOS:871 and 872,
(e) SEQ ID NOS:937 and 938,
(f) SEQ ID NOS:1003 and 1004,
(g) SEQ ID NOS:1007 and 1008,
(h) SEQ ID NOS:1017 and 1018,
(i) SEQ ID NOS:1161 and 1162, and
(j) SEQ ID NOS: 1163 and 1164,
(k) SEQ ID NOs: 1220 and 1221,
(l) SEQ ID NOs: 1224 and 1225,
(m) SEQ ID NOs: 1230 and 1231,
(n) SEQ ID NOs: 1232 and 1233,
(o) SEQ ID NOs: 1188 and 1189,
(p) SEQ ID NOs: 1190 and 1191,
(q) SEQ ID NOs: 1244 and 1245,
(r) SEQ ID NOs: 1250 and 1251-,
(s) SEQ ID NOs: 1254 and 1255, and
(t) SEQ ID NOs: 1246 and 1247.

79. A method for treating a subject having a disease, disorder or condition associated with PNPLA3 expression, the method comprising administering to the subject a therapeutically effective amount of an RNAi oligonucleotide comprising a sense strand and an antisense strand, wherein the sense strand and antisense strands are selected from the group consisting of:
(a) SEQ ID NOS:787 and 788,
(b) SEQ ID NOS:843 and 844,
(c) SEQ ID NOS:867 and 868,
(d) SEQ ID NOS:871 and 872,
(e) SEQ ID NOS:937 and 938,
(f) SEQ ID NOS:1003 and 1004,
(g) SEQ ID NOS:1007 and 1008,
(h) SEQ ID NOS:1017 and 1018,
(i) SEQ ID NOS:1161 and 1162, and
(j) SEQ ID NOS: 1163 and 1164,
(k) SEQ ID NOs: 1220 and 1221,
(l) SEQ ID NOs: 1224 and 1225,
(m) SEQ ID NOs: 1230 and 1231,
(n) SEQ ID NOs: 1232 and 1233,
(o) SEQ ID NOs: 1188 and 1189,
(p) SEQ ID NOs: 1190 and 1191,
(q) SEQ ID NOs: 1244 and 1245,
(r) SEQ ID NOs: 1250 and 1251-,
(s) SEQ ID NOs: 1254 and 1255, and
(t) SEQ ID NOs: 1246 and 1247.

80. The method of claim 79, wherein the sense strand comprises SEQ ID NO:1224, and wherein the antisense strand comprises SEQ ID NO: 1225; or wherein the sense strand comprises a nucleotide sequence as set forth in SEQ ID NO: 1220 and wherein the antisense strand comprises a nucleotide sequence as set forth in SEQ ID NO: 1221.

81. The method of claim 79, wherein the sense strand comprises SEQ ID NO: 1230, and wherein the antisense strand comprises SEQ ID NO: 1231.

82. The method of claim 79, wherein the sense strand comprises SEQ ID NO: 1232, and wherein the antisense strand comprises SEQ ID NO: 1233.

83. The method of claim 79, wherein the sense strand comprises SEQ ID NO: 1188, and wherein the antisense strand comprises SEQ ID NO: 1189.

84. The method of claim 79, wherein the sense strand comprises SEQ ID NO: 1190, and wherein the antisense strand comprises SEQ ID NO: 1191.

85. The method of claim 79, wherein the sense strand comprises SEQ ID NO: 1244, and wherein the antisense strand comprises SEQ ID NO: 1245.

86. The method of claim 79, wherein the sense strand comprises SEQ ID NO:1250, and wherein the antisense strand comprises SEQ ID NO:1251.

87. The method of claim 79, wherein the sense strand comprises SEQ ID NO:1254, and wherein the antisense strand comprises SEQ ID NO:1255.

88. The method of claim 79, wherein the sense strand comprises SEQ ID NO:1246, and wherein the antisense strand comprises SEQ ID NO:1247.

89. The method of any one of claims 76 to 88, wherein the disease, disorder or condition associated with PNPLA3 expression is selected from the group consisting of cardiometabolic disease, alcoholic hepatitis (AH), alcoholic liver disease (ALD), cirrhosis, hepatocellular carcinoma (HCC), non-alcoholic fatty liver disease (NAFLD), and non-alcoholic steatohepatitis (NASH).

90. Use of the RNAi oligonucleotide of any one of claims 1 to 67, or the pharmaceutical composition of claim 69, in the manufacture of a medicament for the treatment of a disease, disorder or condition associated with PNPLA3 expression, optionally for the treatment of cardiometabolic disease, alcoholic hepatitis (AH), alcoholic liver disease (ALD), cirrhosis, hepatocellular carcinoma (HCC), non-alcoholic fatty liver disease (NAFLD), or non-alcoholic steatohepatitis (NASH).

91. The RNAi oligonucleotide of any one of claims 1 to 67, or the pharmaceutical composition of claim 69, for use, or adaptable for use, in the treatment of a disease, disorder or condition associated with PNPLA3 expression, optionally for the treatment of cardiometabolic disease, alcoholic hepatitis (AH), CCA, PSC, alcoholic liver disease (ALD), cirrhosis, hepatocellular carcinoma (HCC), non-alcoholic fatty liver disease (NAFLD), or non-alcoholic steatohepatitis (NASH).

92. A kit comprising the RNAi oligonucleotide of any one of claims 1 to 67, an optional pharmaceutically acceptable carrier, and a package insert comprising instructions for administration to a subject having a disease, disorder or condition associated with PNPLA3 expression.

93. The use of claim 90, the RNAi oligonucleotide or pharmaceutical composition for use, or adaptable for use, of claim 91, or the kit of claim 92, wherein the disease, disorder or condition associated with PNPLA3 expression is cardiometabolic disease, alcoholic hepatitis (AH), alcoholic liver disease (ALD), cirrhosis, hepatocellular carcinoma (HCC), non-alcoholic fatty liver disease (NAFLD), or non-alcoholic steatohepatitis (NASH).
